(19) United States
(12) Patent Application Publication
(10) Pub. No.: US 2019/0017034 A1
(43) Pub. Date: Jan. 17, 2019

(54) PROTEIN PROSTHESES FOR MITOCHONDRIAL DISEASES OR CONDITIONS

(71) Applicant: The General Hospital Corporation, Boston, MA (US)

(72) Inventors: Vamsi MOOTHA, Boston, MA (US); Denis TITOV, Boston, MA (US); Valentin CRACAN, Boston, MA (US); Zenon GRABAREK, Boston, MA (US)

(21) Appl. No.: 15/749,218

(22) PCT Filed: Aug. 1, 2016
(86) PCT No.: PCT/US16/45015

§ 371 Date: Jan. 31, 2018

Related U.S. Application Data
(60) Provisional application No. 62/199,695, filed on Jul. 31, 2015.

(51) Int. Cl. C12N 9/02; A61P 25/16; C12N 15/52; C12N 15/85; A61K 38/16; C12N 15/62; C12N 15/113; A61K 9/127; A61K 38/17; A61K 47/18; A61K 47/66; A61K 47/42

(52) U.S. Cl. CPC C12N 9/0036; A61P 25/16; C12N 15/52; C12N 15/85; A61K 38/162; C12N 15/62; A61K 47/42; A61K 9/127; A61K 38/1709; A61K 38/1774; A61K 47/18; A61K 47/66; C12N 15/113

(57) ABSTRACT

The invention encompasses water-forming NADH and NADPH oxidases and the use of these enzymes to treat mammalian diseases or conditions associated with an elevated NADH/NAD+ ratio or NADPH/NADP+ ratio. Such pathologies include disorders caused by one or more defects in the mitochondrial respiratory chain, glucose metabolism disorders, cancers associated with reductive stress, and aging. The invention also provides a research tool for investigating the effect of exogenous water-forming NADH or NADPH oxidases on the metabolism of a mammalian cell, such as a human cell, and for elucidating the role of respiratory chain proteins in mitochondrial disorders.

### FIELD OF THE INVENTION

[0001] The invention relates to the fields of enzyme therapy and gene therapy for the treatment of diseases and conditions associated with mitochondrial dysfunction. The invention further relates to the field of mitochondrial metabolism for the analysis of defects in mitochondrial proteins that contribute to the onset of human pathology.

### BACKGROUND OF THE INVENTION

[0002] The mitochondrial respiratory chain constitutes a vital component of a healthy eukaryotic cell, as the ensemble of proteins and redox-active molecules that comprise this complex is chiefly responsible for energy production and drives aerobic cellular respiration. Defects in the activity of one or more proteins within the respiratory chain, as well as in proteins that are responsible for the assembly, maintenance, or turnover of the respiratory chain, are associated with a variety of human diseases, including rare genetic syndromes and common diseases, such as neurodegeneration, cancer, and diabetes, as well as the aging process itself. Disorders associated with respiratory chain dysfunction are considered to arise from inefficient mitochondrial adenosine triphosphate (ATP) synthesis. As such, the development of therapeutic proteins for mitochondrial diseases has focused on replacing the activity of individual complexes of the respiratory chain so as to preserve the mitochondrial production of ATP. For instance, recent attempts at treating deficiencies in complex I of the respiratory chain involve the use of the yeast NADH dehydrogenase NDI1 (see US 2011/0197294). Other investigations attempt to treat defects in complexes III and/or IV using an alternative oxidase (AOX; see U.S. Pat. No. 7,572,616). These approaches attempt to treat mitochondrial disorders by replacing defective components of the respiratory chain with supplemental oxidoreductases in order to maintain the chemiosmotic gradient that drives mitochondrial ATP production.

[0003] The use of these therapeutic approaches to treating mitochondrial disorders is limited to patients harboring mutations in particular complexes of the respiratory chain. The challenges associated with treating diseases arising from defective respiratory chain activity generally stem from the need to identify the individual mitochondrial protein in a specific patient that is defective and to design a treatment that targets this particular complex. This approach is particularly challenging in patients having deficiency of multiple or all complexes of the respiratory chain. There is currently a need for improved therapies for mitochondrial disorders.

### SUMMARY OF THE INVENTION

[0004] The invention features water-forming NADH and NADPH oxidases as protein prostheses for treating mitochondrial diseases and disorders, as well as water-forming NADH and NADPH oxidases as research tools for investigating the effects of NADH and NADPH oxidation with concomitant reduction of molecular oxygen on cells, such as mammalian cells (e.g., human cells).

[0005] Embodiments of the invention include a mammalian cell containing a water-forming NADH oxidase. The mammalian cell may include a polynucleotide encoding the water-forming NADH oxidase, which may optionally be under the control of a mammalian promoter. The polynucleotide may be codon-optimized for expression in a mammalian cell. The polynucleotide may be integrated into the nuclear or mitochondrial genome of a mammalian cell (e.g., a human cell). In particular, the NADH oxidase is not endogenous to the mammalian cell. The water-forming NADH oxidase may have a polypeptide sequence having at least 85%, 90%, 95%, 97%, 99%, or 100% sequence identity to the sequence of any one of SEQ ID NOs: 1-273.

[0006] The water-forming NADH oxidase may exhibit various biochemical properties. For instance, a water-forming NADH oxidase may:
[0007] a) exhibit Km values for NADH and O₂ of no more than about 100 μM and 20 μM, respectively; and/or
[0008] b) be capable of producing less than about 10% by mole of H₂O₂ compared to H₂O production during the catalytic cycle of the oxidase; and/or
[0009] c) produce less than about 2% by mole of H₂O₂ compared to H₂O production during the catalytic cycle of the oxidase; and/or
[0010] d) be capable of selectively oxidizing NADH over NADPH (e.g., exhibits a k_{cat}/K_{M} for NADH that is increased by 10-fold, 20-fold, 30-fold, 40-fold, 50-fold, 60-fold, 70-fold, 80-fold, 90-fold, 100-fold, 200-fold, 300-fold, 400-fold, 500-fold, 600-fold, 700-fold, 800-fold, 900-fold, 1,000-fold, 1,100-fold, 1,200-fold, 1,300-fold, 1,400-fold, 1,500-fold, 1,600-fold, 1,700-fold, 1,800-fold, 1,900-fold, 2,000-fold, 3,000-fold, 4,000-fold, 5,000-fold, 10,000-fold, or more, relative to the k_{cat}/K_{M} exhibited for NADPH); and/or
[0011] e) be capable of binding flavin adenine dinucleotide (FAD) when the NADH oxidase is in a catalytically active state; and/or
[0012] f) be capable of selectively reducing the secreted or cytosolic ratio of lactate to pyruvate; and/or
[0013] g) be capable of increasing oxygen consumption by a mammalian cell (e.g., a human cell, for instance, by 1.1-fold to 10-fold (e.g., 1.1-fold, 1.2-fold, 1.3-fold, 1.4-fold, 1.5-fold, 1.6-fold, 1.7-fold, 1.8-fold, 1.9-fold, 2.0-fold, 2.1-fold, 2.2-fold, 2.3-fold, 2.4-fold, 2.5-fold, 2.6-fold, 2.7-fold, 2.8-fold, 2.9-fold, 3.0-fold, 3.5-fold, 4.0-fold, 4.5-fold, 5.0-fold, 5.5-fold, 6.0-fold, 7.0-fold, 8.0-fold, 9.0-fold, or 10.0-fold, or more) without increasing the rate of adenosine triphosphate (ATP) synthesis; and/or
[0014] h) be capable of increasing the rate of glucose production by gluconeogenesis; and/or
[0015] i) be capable of increasing the rate of proliferation of a mammalian cell in which there is a defect in the replication of mitochondrial DNA; and/or
[0016] j) be capable of increasing the rate of proliferation of a mammalian cell in which there is a defect in the translation of mitochondrial proteins.
[0017] k) be capable of increasing the rate of proliferation of a mammalian cell in which there is a defect in the activity of mitochondrial respiration.

[0018] The invention also features a water-forming NADH oxidase that may be prepared as a fusion protein. The fusion protein may contain the NADH oxidase and an additional molecule, which may be an antibody Fc region, a cell-penetrating peptide (such as a peptide having the sequence of any one of SEQ ID NOs: 279-297), a molecule that increases the serum half-life of the fusion protein, a molecule that increases the solubility of the NADH oxidase, or a targeting molecule (such as a polypeptide, a saccharide, a lipid, or a small molecule) that selectively localizes to a particular organelle (e.g., the mitochondria) within the cell. The targeting molecule may be the mitochondrial targeting sequence of subunit IV of human cytochrome c oxidase.

[0019] The invention also features a polynucleotide encoding a water-forming NADH oxidase, such that the gene is under the control of a mammalian promoter and/or also includes a nucleic acid sequence that encodes a cell-penetrating peptide or a peptide that localizes to a particular organelle within a mammalian cell (e.g., a human cell). The polynucleotide may be codon-optimized for expression in a mammalian cell. The polynucleotide may be part of a transposable element, which may optionally contain a transposase recognition and/or cleavage element that may promote incorporation into a deoxyribonucleic acid (DNA) molecule of a mammalian cell, such as nuclear or mitochondrial DNA. The water-forming NADH oxidase encoded by a polynucleotide of the invention may have at least 85%, 90%, 95%, 97%, 99%, or 100% sequence identity to the sequence of any one of SEQ ID NOs: 1-273, and may optionally have any of the biochemical properties described above. The NADH oxidase encoded by a polynucleotide of the invention may also be a fusion protein as described above, such that the components of the fusion protein are proteinogenic.

[0020] The invention also features a vector containing a polynucleotide that encodes a water-forming NADH oxidase. The vector may be an expression vector, such as a eukaryotic expression vector, or a viral vector, such as an adenovirus (e.g., a serotype 5, 26, 35, or 48 adenovirus), retrovirus (e.g., a γ-retrovirus or a lentivirus), poxvirus, adeno-associated virus, baculovirus, herpes simplex virus, and a vaccinia virus (e.g., modified vaccinia Ankara (MVA)). The NADH oxidase encoded by the polynucleotide may be a fusion protein, such as those described above and herein.

[0021] The invention also features a polypeptide containing a water-forming NADH oxidase and an additional molecule at the N- or C-terminus of the polypeptide, optionally tethered by a linker. The linker may be a peptide containing one or more amino acids, including D- or L-amino acids and/or non-naturally occurring amino acids. Alternatively, the linker may be a non-peptidic molecule. In particular embodiments, the linker may be cleavable, for example, by a process such as enzymatic hydrolysis, photolysis, hydrolysis under acidic conditions, hydrolysis under basic conditions, oxidation, disulfide reduction, nucleophilic cleavage, and organometallic cleavage. The NADH oxidase may have any of the biochemical properties or sequence characteristics described above. The NADH oxidase may be capable of selectively increasing the total ratio of NAD⁺ to NADH in an organelle without significantly altering the ratio in a different organelle, and/or may be capable of inducing the dephosphorylation of pyruvate dehydrogenase complex (PDH). The additional molecule may be an antibody Fc region, a cell-penetrating peptide (e.g., as described above), a molecule that increases the serum half-life of the polypeptide, a molecule that increases the solubility of the NADH oxidase, or a targeting molecule that selectively localizes the polypeptide to a particular organelle within a mammalian cell (such as one that localizes to the mitochondria, nucleus, golgi, endoplasmic reticulum, lysosome, peroxisome, or adiposome, e.g., a peptide containing subunit IV of human cytochrome c oxidase that is directed to the mitochondria). The polypeptide may contain a first molecule that is capable of being selectively bound by a second molecule. For instance, the first molecule may be an epitope tag, such as maltose-binding protein, glutathione-S-transferase, a poly-histidine tag, a FLAG-tag, a myc-tag, human influenza hemagglutinin (HA) tag, biotin, or streptavidin. The second molecule may be maltose, glutathione, a nickel-containing complex, an anti-FLAG antibody, an anti-myc antibody, an anti-HA antibody, biotin, or streptavidin. The polypeptide may optionally contain a fluorescent molecule, such as green fluorescent protein, cyan fluorescent protein, yellow fluorescent protein, red fluorescent protein, phycoerythrin, allophycocyanin, hoescht, 4′,6-diamidino-2-phenylindole (DAPI), propidium iodide, fluorescein, coumarin, rhodamine, tetramethylrhoadmine, and cyanine.

[0022] Additional embodiments of the invention include a mammalian cell containing a water-forming NADPH oxidase. The mammalian cell may include a polynucleotide encoding the water-forming NADPH oxidase, which may optionally be under the control of a mammalian promoter. The polynucleotide may be codon-optimized for expression in a mammalian cell. The polynucleotide may be integrated into the nuclear or mitochondrial genome of a mammalian cell (e.g., a human cell). In particular, the NADPH oxidase is not endogenous to the mammalian cell. The water-forming NADPH oxidase may have a polypeptide sequence having at least 85%, 90%, 95%, 97%, 99%, or 100% sequence identity to the sequence of SEQ ID NOs: 329 or 330. For example, the water-forming NADPH oxidase may have a polypeptide sequence having at least 85%, 90%, 95%, 97%, 99%, or 100% sequence identity to the sequence of SEQ ID NO: 329 and having one or more (e.g., one, two, three, four, or all five) of the following mutations relative to SEQ ID NO: 1: G158A, D176A, A177R, M178S, and P183R. For instance, the polypeptide may have a polypeptide sequence having at least 85%, 90%, 95%, 97%, 99%, or 100% sequence identity to the sequence of SEQ ID NO: 329 and a G158A mutation relative to SEQ ID NO: 1. The polypeptide may have a polypeptide sequence having at least 85%, 90%, 95%, 97%, 99%, or 100% sequence identity to the sequence of SEQ ID NO: 329 and a D176A mutation relative to SEQ ID NO: 1. The polypeptide may have a polypeptide sequence having at least 85%, 90%, 95%, 97%, 99%, or 100% sequence identity to the sequence of SEQ ID NO: 329 and a A177R mutation relative to SEQ ID NO: 1. The polypeptide may have a polypeptide sequence having at least 85%, 90%, 95%, 97%, 99%, or 100% sequence identity to the sequence of SEQ ID NO: 329 and a M178S mutation relative to SEQ ID NO: 1. The polypeptide may have a polypeptide sequence having at least 85%, 90%, 95%, 97%, 99%, or 100% sequence identity to the sequence of SEQ ID NO: 329 and a P183R mutation relative to SEQ ID NO: 1. In some embodiments, the polypeptide has a polypeptide sequence having at least 85%, 90%, 95%, 97%, 99%, or 100% sequence identity to the sequence of SEQ ID NO: 329 and additionally contains two of the mutations G158A, D176A, A177R, M178S, and P183R relative to SEQ ID NO: 1. In some embodiments, the polypeptide has a polypeptide sequence having at least 85%, 90%, 95%, 97%, 99%, or 100% sequence identity to the sequence of SEQ ID NO: 329 and additionally contains three of the mutations G158A, D176A, A177R, M178S, and P183R relative to SEQ ID NO: 1. In some embodiments, the polypeptide has a polypeptide sequence having at least 85%, 90%, 95%, 97%, 99%, or 100% sequence identity to the sequence of SEQ ID NO: 329 and additionally contains four of the mutations G158A, D176A, A177R, M178S, and P183R relative to SEQ ID NO: 1. In some embodiments, the polypeptide has a polypeptide sequence having at least 85%, 90%, 95%, 97%, 99%, or 100% sequence identity to the sequence of SEQ ID NO: 329 and additionally contains the mutations G158A, D176A, A177R, M178S, and P183R relative to SEQ ID NO: 1. In some embodiments, the NADPH oxidase contains a polypeptide sequence having at least 85%, 90%, 95%, 97%, 99%, or 100% sequence identity to the sequence of SEQ ID NO: 330, wherein the NADH oxidase contains one or more mutations in the cofactor specific loop region (residues 191-198) of SEQ ID NO: 4, such as a mutation selected from the group consisting of D191A, V192R, V193H, and A198R relative to the amino acid sequence of SEQ ID NO: 4.

[0023] The water-forming NADPH oxidase may exhibit various biochemical properties. For instance, a water-forming NADPH oxidase may:
[0024] a) exhibit a Km value for NADPH of no more than about 100 μM (e.g., a Km value for NADPH of from about 100 nM to about 100 μM, such as a Km value for NADPH of from 20 μM to about 25 μM); and/or
[0025] b) be capable of selectively oxidizing NADPH over NADH (e.g., exhibits a k_{cat}/K_{M} for NADPH that is increased by 10-fold, 20-fold, 30-fold, 40-fold, 50-fold, 60-fold, 70-fold, 80-fold, 90-fold, 100-fold, 200-fold, 300-fold, 400-fold, 500-fold, 600-fold, 700-fold, 800-fold, 900-fold, 1,000-fold, 1,100-fold, 1,200-fold, 1,300-fold, 1,400-fold, 1,500-fold, 1,600-fold, 1,700-fold, 1,800-fold, 1,900-fold, 2,000-fold, 3,000-fold, 4,000-fold, 5,000-fold, 10,000-fold, or more, relative to the k_{cat}/K_{M} exhibited for NADH); and/or
[0026] c) be capable of increasing oxygen consumption by a mammalian cell (e.g., a human cell, for instance, by 1.1-fold to 10-fold (e.g., 1.1-fold, 1.2-fold, 1.3-fold, 1.4-fold, 1.5-fold, 1.6-fold, 1.7-fold, 1.8-fold, 1.9-fold, 2.0-fold, 2.1-fold, 2.2-fold, 2.3-fold, 2.4-fold, 2.5-fold, 2.6-fold, 2.7-fold, 2.8-fold, 2.9-fold, 3.0-fold, 3.5-fold, 4.0-fold, 4.5-fold, 5.0-fold, 5.5-fold, 6.0-fold, 7.0-fold, 8.0-fold, 9.0-fold, or 10.0-fold, or more).

[0027] The invention also features a water-forming NADPH oxidase that may be prepared as a fusion protein. The fusion protein may contain the NADPH oxidase and an additional molecule, which may be an antibody Fc region, a cell-penetrating peptide (such as a peptide having the sequence of any one of SEQ ID NOs: 279-297), a molecule that increases the serum half-life of the fusion protein, a molecule that increases the solubility of the NADH oxidase, or a targeting molecule (such as a polypeptide, a saccharide, a lipid, or a small molecule) that selectively localizes to a particular organelle (e.g., the mitochondria) within the cell. The targeting molecule may be the mitochondrial targeting sequence of subunit IV of human cytochrome c oxidase.

[0028] The invention also features a polynucleotide that encodes a water-forming NADPH oxidase containing a polypeptide sequence having at least 85%, 90%, 95%, 97%, 99%, or 100% sequence identity to SEQ ID NO: 329. For instance, the polypeptide may have at least 85%, 90%, 95%, 97%, 99%, or 100% sequence identity to SEQ ID NO: 329 and one or more (e.g., one, two, three, four, or all five) of the following mutations relative to SEQ ID NO: 1: G158A, D176A, A177R, M178S, and P183R. For instance, the polypeptide may have a polypeptide sequence having at least 85%, 90%, 95%, 97%, 99%, or 100% sequence identity to the sequence of SEQ ID NO: 329 and a G158A mutation relative to SEQ ID NO: 1. The polypeptide may have a polypeptide sequence having at least 85%, 90%, 95%, 97%, 99%, or 100% sequence identity to the sequence of SEQ ID NO: 329 and a D176A mutation relative to SEQ ID NO: 1. The polypeptide may have a polypeptide sequence having at least 85%, 90%, 95%, 97%, 99%, or 100% sequence identity to the sequence of SEQ ID NO: 329 and a A177R mutation relative to SEQ ID NO: 1. The polypeptide may have a polypeptide sequence having at least 85%, 90%, 95%, 97%, 99%, or 100% sequence identity to the sequence of SEQ ID NO: 329 and a M178S mutation relative to SEQ ID NO: 1. The polypeptide may have a polypeptide sequence having at least 85%, 90%, 95%, 97%, 99%, or 100% sequence identity to the sequence of SEQ ID NO: 1 and a P183R mutation relative to SEQ ID NO: 1. In some embodiments, the polypeptide has a polypeptide sequence having at least 85%, 90%, 95%, 97%, 99%, or 100% sequence identity to the sequence of SEQ ID NO: 1 and additionally contains two of the mutations G158A, D176A, A177R, M178S, and P183R relative to SEQ ID NO: 1. In some embodiments, the polypeptide has a polypeptide sequence having at least 85%, 90%, 95%, 97%, 99%, or 100% sequence identity to the sequence of SEQ ID NO: 329 and additionally contains three of the mutations G158A, D176A, A177R, M178S, and P183R relative to SEQ ID NO: 1. In some embodiments, the polypeptide has a polypeptide sequence having at least 85%, 90%, 95%, 97%, 99%, or 100% sequence identity to the sequence of SEQ ID NO: 329 and additionally contains four of the mutations G158A, D176A, A177R, M178S, and P183R relative to SEQ ID NO: 1. In some embodiments, the polypeptide has a polypeptide sequence having at least 85%, 90%, 95%, 97%, 99%, or 100% sequence identity to the sequence of SEQ ID NO: 329 and additionally contains the mutations G158A, D176A, A177R, M178S, and P183R relative to SEQ ID NO: 1. The NADPH oxidase may contain a polypeptide sequence having at least 85%, 90%, 95%, 97%, 99%, or 100% sequence identity to the sequence of SEQ ID NO: 330, wherein the NADH oxidase contains one or more mutations in the cofactor specific loop region (residues 191-198) of SEQ ID NO: 4, such as a mutation selected from the group consisting of D191A, V192R, V193H, and A198R relative to the amino acid sequence of SEQ ID NO: 4.

[0029] In some embodiments, the polynucleotide is under the control of a mammalian promoter and/or also includes a nucleic acid sequence that encodes a cell-penetrating peptide or a peptide that localizes to a particular organelle within a mammalian cell (e.g., a human cell). The polynucleotide may be codon-optimized for expression in a mammalian cell. The polynucleotide may be part of a transposable element, which may optionally contain a transposase recognition and/or cleavage element that may promote incorporation into a deoxyribonucleic acid (DNA) molecule of a mammalian cell, such as nuclear or mitochondrial DNA. The water-forming NADPH oxidase encoded by a polynucleotide of the invention may have at least 85%, 90%, 95%, 97%, 99%, or 100% sequence identity to the sequence of SEQ ID NOs: 329 or 330, such as a variant of SEQ ID NO: 329 or 330 described above, and may optionally have any of the biochemical properties described above. The NADPH oxidase encoded by a polynucleotide of the invention may also be a fusion protein as described above, such that the components of the fusion protein are proteinogenic.

[0030] The invention also features a vector containing a polynucleotide that encodes a water-forming NADPH oxidase. The vector may be an expression vector, such as a eukaryotic expression vector, or a viral vector, such as an adenovirus (e.g., a serotype 5, 26, 35, or 48 adenovirus), retrovirus (e.g., a γ-retrovirus or a lentivirus), poxvirus, adeno-associated virus, baculovirus, herpes simplex virus, and a vaccinia virus (e.g., modified vaccinia Ankara (MVA)). The NADH oxidase encoded by the polynucleotide may be a fusion protein, such as those described above and herein.

[0031] The invention also features an isolated polypeptide having at least 85%, 90%, 95%, 97%, 99%, or 100% sequence identity to SEQ ID NO: 329. For instance, the polypeptide may have at least 85%, 90%, 95%, 97%, 99%, or 100% sequence identity to SEQ ID NO: 329 and one or more (e.g., one, two, three, four, or all five) of the following mutations relative to SEQ ID NO: 1: G158A, D176A, A177R, M178S, and P183R. For instance, the polypeptide may have a polypeptide sequence having at least 85%, 90%, 95%, 97%, 99%, or 100% sequence identity to the sequence of SEQ ID NO: 329 and a G158A mutation relative to SEQ ID NO: 1. The polypeptide may have a polypeptide sequence having at least 85%, 90%, 95%, 97%, 99%, or 100% sequence identity to the sequence of SEQ ID NO: 329 and a D176A mutation relative to SEQ ID NO: 1. The polypeptide may have a polypeptide sequence having at least 85%, 90%, 95%, 97%, 99%, or 100% sequence identity to the sequence of SEQ ID NO: 329 and a A177R mutation relative to SEQ ID NO: 1. The polypeptide may have a polypeptide sequence having at least 85%, 90%, 95%, 97%, 99%, or 100% sequence identity to the sequence of SEQ ID NO: 329 and a M178S mutation relative to SEQ ID NO: 1. The polypeptide may have a polypeptide sequence having at least 85%, 90%, 95%, 97%, 99%, or 100% sequence identity to the sequence of SEQ ID NO: 1 and a P183R mutation relative to SEQ ID NO: 1. In some embodiments, the polypeptide has a polypeptide sequence having at least 85%, 90%, 95%, 97%, 99%, or 100% sequence identity to the sequence of SEQ ID NO: 1 and additionally contains two of the mutations G158A, D176A, A177R, M178S, and P183R relative to SEQ ID NO: 1. In some embodiments, the polypeptide has a polypeptide sequence having at least 85%, 90%, 95%, 97%, 99%, or 100% sequence identity to the sequence of SEQ ID NO: 329 and additionally contains three of the mutations G158A, D176A, A177R, M178S, and P183R relative to SEQ ID NO: 1. In some embodiments, the polypeptide has a polypeptide sequence having at least 85%, 90%, 95%, 97%, 99%, or 100% sequence identity to the sequence of SEQ ID NO: 329 and additionally contains four of the mutations G158A, D176A, A177R, M178S, and P183R relative to SEQ ID NO: 1. In some embodiments, the polypeptide has a polypeptide sequence having at least 85%, 90%, 95%, 97%, 99%, or 100% sequence identity to the sequence of SEQ ID NO: 329 and additionally contains the mutations G158A, D176A, A177R, M178S, and P183R relative to SEQ ID NO: 1.

[0032] The invention further includes polypeptide containing a water-forming NADPH oxidase and an additional molecule at the N- or C-terminus of the polypeptide, optionally tethered by a linker. The polypeptide may have, for instance, at least 85%, 90%, 95%, 97%, 99%, or 100% sequence identity to the sequence of SEQ ID NO: 329 or 330, such as a variant of SEQ ID NO: 329 described above. In some embodiments, the NADPH oxidase contains a polypeptide sequence having at least 85%, 90%, 95%, 97%, 99%, or 100% sequence identity to the sequence of SEQ ID NO: 330, wherein the NADH oxidase contains one or more mutations in the cofactor specific loop region (residues 191-198) of SEQ ID NO: 4, such as a mutation selected from the group consisting of D191A, V192R, V193H, and A198R relative to the amino acid sequence of SEQ ID NO: 4. The linker may be a peptide containing one or more amino acids, including D- or L-amino acids and/or non-naturally occurring amino acids. Alternatively, the linker may be a non-peptidic molecule. In particular embodiments, the linker may be cleavable, for example, by a process such as enzymatic hydrolysis, photolysis, hydrolysis under acidic conditions, hydrolysis under basic conditions, oxidation, disulfide reduction, nucleophilic cleavage, and organometallic cleavage. The NADPH oxidase may have any of the biochemical properties or sequence characteristics described above. The NADPH oxidase may be capable of selectively increasing the total ratio of NADP⁺ to NADPH (e.g., by 2-fold, 5-fold, 10-fold, 20-fold, 100-fold, or more) in an organelle without significantly altering the ratio in a different organelle. The additional molecule may be an antibody Fc region, a cell-penetrating peptide (e.g., as described above), a molecule that increases the serum half-life of the polypeptide, a molecule that increases the solubility of the NADPH oxidase, or a targeting molecule that selectively localizes the polypeptide to a particular organelle within a mammalian cell (such as one that localizes to the mitochondria, nucleus, golgi, endoplasmic reticulum, lysosome, peroxisome, or adiposome, e.g., a peptide containing subunit IV of human cytochrome c oxidase that is directed to the mitochondria). The polypeptide may contain a first molecule that is capable of being selectively bound (e.g., with a K_{D} of 100 nM or less) by a second molecule. For instance, the first molecule may be an epitope tag, such as maltose-binding protein, glutathione-S-transferase, a poly-histidine tag, a FLAG-tag, a myc-tag, human influenza hemagglutinin (HA) tag, biotin, or streptavidin. The second molecule may be maltose, glutathione, a nickel-containing complex, an anti-FLAG antibody, an anti-myc antibody, an anti-HA antibody, biotin, or streptavidin. The polypeptide may optionally contain a fluorescent molecule, such as green fluorescent protein, cyan fluorescent protein, yellow fluorescent protein, red fluorescent protein, phycoerythrin, allophycocyanin, hoescht, 4′,6-diamidino-2-phenylindole (DAPI), propidium iodide, fluorescein, coumarin, rhodamine, tetramethylrhoadmine, and cyanine.

[0033] The invention also features a composition containing a water-forming NADH or NADPH oxidase suitable for administration to a mammal (e.g., a human) that can be used to treat a particular disease. In certain embodiments, the water-forming NADH or NADPH oxidase may have any of the biochemical properties as described above, and/or may optionally be a fusion protein as described above. The composition may include a complex, such as a liposome or nanoparticle, that contains the water-forming NADH oxidase or NADPH. The composition may be formulated for intravenous, intramuscular, oral, parenteral, intraperitoneal, intraarterial, transdermal, sublingual, nasal, transbuccal, liposomal, adiposal, opthalmic, intraocular, subcutaneous, intrathecal, topical, or local administration or by inhalation. The composition may be used to treat a disease or condition in a mammal (e.g., a human) caused by mitochondrial dysfunction. The composition may include one or more mammalian cells, polynucleotides, vectors, or polypeptides of the invention. The mitochondrial dysfunction may be caused by a defect in at least one component of the respiratory chain, such as one or more defects in complex I, II, III, and/or IV. For instance, the disease or condition may be mitochondrial myopathy, Wolff-Parkinsons-White syndrome, neuropathy, ataxia, Friedreich's ataxia, retinitis pigmentosa, and ptosis (NARP), myoneurogenic gastrointestinal encephalopathy (MNGIE), myoclonic epilepsy with ragged red fibers (MERRF), mitochondrial encephalomyopathy, lactic acidosis, and stroke-like symptoms (MELAS), mitochondrial DNA depletion, chronic progressive external ophthalmoplegia, Kearns-Sayre syndrome, Leber hereditary optic neuropathy, mitochondrial encephalomyopathy, myoclonic epilepsy myopathy sensory ataxia (MEMSA), myoclonic epilepsy, mitochondrial recessive ataxia syndrome, sensory ataxia neuropathy, dysarthria, ophthalmoplegia, spinocerebellar ataxia, sarcopenia, skeletal muscle atrophy, lactic acidosis, seizures, stroke-like episodes, gray or white matter disease, autonomic dysfunction, cardiac conduction defects, cardiomyopathy, pancreatic exocrine or endocrine dysfunction, skeletal muscle myopathy, peripheral neuropathy, blindness, gastrointestinal dysmotility, deafness, liver failure, or kidney failure. The disease or condition may be a neurodegenerative disease (e.g., Parkinson's disease), a glucose metabolism disorder (e.g., diabetes or obesity), or aging.

[0034] The compositions of the invention may also be used to treat cancer in a mammal, such as a human patient. For instance, one or more mammalian cells, polynucleotides, vectors, or polypeptides of the invention may be administered to a mammal (e.g., a human) in order to treat a particular cancer, such as breast cancer, paraganglioma, phaeochromocytoma, leiomyoma, leiomyosarcoma, or renal cell carcinoma. Compositions of the invention may also be used in the manufacture of a medicament for treating any of the above-described disorders.

[0035] In addition to their utility as therapeutics for human disease, a composition of the invention (such as the above-described mammalian cells, polynucleotides, vectors, and polypeptides) may also be used as a research tool in analyzing an effect of one or more water-forming NADH or NADPH oxidases on a mammalian cell. For instance, the compositions of the invention may be used to investigate a change in the ratio of NAD⁺ or NADP⁺ to NADH or NADPH, a change in the ratio of lactate to pyruvate, a change in the rate of gluconeogenesis, or a change in the phosphorylation state of PDH in a mammalian cell or in a specific organelle within the mammalian cell. The invention also features a method of analyzing an effect of one or more water-forming NADH or NADPH oxidases on a mammalian cell by contacting the mammalian cell with a polynucleotide, vector, polypeptide, or other composition of the invention as described above. For instance, using the methods of the invention, one can determine the presence or activity of a water-forming NADH or NADPH oxidase in a mammalian cell. Optionally, the methods of the invention may include determining the absolute or relative concentration of one or more molecules that is produced or released by a mammalian cell containing a water-forming NADH or NADPH oxidase as a result of a chemical reaction that occurs during cellular respiration. Exemplary molecules that can be analyzed according to the methods of the invention include lactate, pyruvate, phosphorylated PDH, NAD⁺, NADP⁺, NADH or NADPH, FAD, FADH₂, and molecular oxygen. Methods of the invention may also include determining the viability of a mammalian cell.

[0036] The invention also features kits that can be used to analyze an effect of water-forming NADH or NADPH oxidase activity in a mammalian cell or within a specific organelle within the mammalian cell, such as the biochemical effects described above. Such kits may contain one or more of the mammalian cells, polynucleotides, vectors, polypeptides, or compositions of the invention described above, as well as instructions for the use of the kit. For instance, a kit of the invention may include a reagent capable of inducing expression of a water-forming NADH or NADPH oxidase in a mammalian cell, or one or more reagents capable of detecting the presence of a water-forming NADH or NADPH oxidase. For instance, a kit of the invention may contain a reagent capable of binding an additional molecule covalently linked to a water-forming NADH or NADPH oxidase, such as an epitope tag as described above. A kit of the invention may optionally contain one or more reagents capable of detecting the enzymatic activity of a water-forming NADH or NADPH oxidase by detecting a product of the chemical reaction catalyzed the NADH or NADPH oxidase. The reagent may be a substrate capable of being oxidized by NAD⁺ or NADP⁺ to produce NADH or NADPH, and the kit may also include an enzyme capable of catalyzing the oxidation of the substrate. A kit may further include a substrate capable of being reduced by NADH or NADPH, and/or an enzyme capable of catalyzing this reduction. The activity of the NADH or NADPH oxidase may be determined, for example, by detecting the presence of a product of the reduction reaction.

### Definitions

[0037] As used herein, the term “cell-penetrating peptide” refers to a polypeptide that is capable of crossing a cell membrane (e.g., a mammalian cell membrane) and entering the intracellular environment. A cell-penetrating peptide may cross or penetrate a cell membrane by any of a variety of mechanisms, including via endocytosis, macropinocytosis, and passive diffusion through membrane pores, among others. A cell-penetrating peptide may be capable of translocating a molecule to which it is chemically bound (e.g., a polypeptide bound by a covalent bond to the cell-penetrating peptide) across a cell membrane. Cell-penetrating peptides include those that enter the cell via endocytosis and reside within endocytic vesicles. In certain cases, as an endocytic vesicle matures, a cell-penetrating peptide may enter the cytosol of a cell. Under other conditions, a vesicle containing a cell-penetrating peptide may fuse to another organelle within a cell, releasing the contents of the vesicle into the organelle.

[0038] As used herein, the term “chelating group” refers to a molecule or ion capable of forming more than one chemical bond with a metal cation.

[0039] As used herein, the term “codon-optimized” describes a polynucleotide sequence in which one or more codons has been modified (e.g., by substitution of one nucleotide within a codon with another nucleotide) so as to increase the expression level of the polypeptide encoded by the polynucleotide in a particular cell (e.g., a human cell).

[0040] As used herein, the term “conjugate” refers to a compound formed by the covalent bonding of a reactive functional group of one molecule with an appropriately reactive functional group of another molecule.

[0041] As used herein, the term “endogenous” describes a molecule (e.g., a polypeptide, nucleic acid, or cofactor) that is found naturally in a particular organism (e.g., a human) or in a particular location within an organism (e.g., an organ, a tissue, or a cell, such as a human cell).

[0042] As used herein, the term “exogenous” describes a molecule (e.g., a polypeptide, nucleic acid, or cofactor) that is not found naturally in a particular organism (e.g., a human) or in a particular location within an organism (e.g., an organ, a tissue, or a cell, such as a human cell). Exogenous materials include those that are provided from an external source to an organism or to cultured matter extracted there from.

[0043] As used herein, the term “fusion protein” refers to a protein that is joined via a covalent bond to another molecule. A fusion protein can be chemically synthesized by, e.g., an amide-bond forming reaction between the N-terminus of one protein to the C-terminus of another protein. Alternatively, a fusion protein containing one protein covalently bound to another protein can be expressed recombinantly in a cell (e.g., a mammalian cell) by expression of a polynucleotide encoding the fusion protein, for example, from a vector or the genome of the cell. A fusion protein may contain one protein that is covalently bound to a linker, which in turn is covalently bound to another molecule. Examples of linkers that can be used for the formation of a fusion protein include peptide-containing linkers, such as those that contain naturally occurring or non-naturally occurring amino acids. In certain cases, it may be desirable to include D-amino acids in the linker, as these residues are not present in naturally-occurring proteins and are thus more resistant to degradation by endogenous proteases. Linkers can be prepared using a variety of strategies that are well known in the field, and depending on the reactive components of the linker, can be cleaved by enzymatic hydrolysis, photolysis, hydrolysis under acidic conditions, hydrolysis under basic conditions, oxidation, disulfide reduction, nucleophilic cleavage, or organometallic cleavage (Leriche, et al., Bioorg. Med. Chem., 20:571-582, 2012).

[0044] As used herein, the term “percent (%) sequence identity” refers to the percentage of amino acid (or nucleic acid) residues of a candidate sequence that are identical to the amino acid (or nucleic acid) residues of a reference sequence after aligning the sequences and introducing gaps, if necessary, to achieve the maximum percent sequence identity (e.g., gaps can be introduced in one or both of the candidate and reference sequences for optimal alignment and non-homologous sequences can be disregarded for comparison purposes). Alignment for purposes of determining percent sequence identity can be achieved in various ways, for instance, using publicly available computer software, such as BLAST, ALIGN, or Megalign (DNASTAR) software. Those skilled in the field can determine appropriate parameters for measuring alignment, including any algorithms needed to achieve maximal alignment over the full length of the sequences being compared. For example, a reference sequence aligned for comparison with a candidate sequence may show that the candidate sequence exhibits from 50% to 100% sequence identity across the full length of the candidate sequence or a selected portion of contiguous amino acid (or nucleic acid) residues of the candidate sequence. The length of the candidate sequence aligned for comparison purposes may be, for example, at least 30%, (e.g., 30%, 40%, 50%, 60%, 70%, 80%, 90%, or 100%) of the length of the reference sequence. When a position in the candidate sequence is occupied by the same amino acid residue as the corresponding position in the reference sequence, then the molecules are identical at that position.

[0045] As used herein, the term “pharmacokinetic profile” refers to the absorption, distribution, metabolism, and elimination of a drug over time following administration to a patient.

[0046] As used herein, the terms “subject” and “patient” refer to an organism that receives treatment for a particular disease or condition as described herein. Examples of subjects and patients include mammals, such as humans, receiving treatment for diseases or conditions, for example, those associated with dysfunction of the mitochondrial respiratory chain.

[0047] As used herein, the term “variant” in the context of a water-forming NADH oxidase of the invention refers to a water-forming NADH oxidase having a polypeptide sequence that differs from the sequence of any one of SEQ ID NOs: 1-273 and has 85% sequence identity or greater (e.g., 85%, 90%, 95%, 97%, 99% sequence identity) relative to the polypeptide sequence of any one of SEQ ID NOs: 1-273. The term “variant” in the context of a water-forming NADPH oxidase of the invention refers to a water-forming NADPH oxidase having a polypeptide sequence that differs from the sequence of any one of SEQ ID NOs: 329 and 330 and has 85% sequence identity or greater (e.g., 85%, 90%, 95%, 97%, 99% sequence identity) relative to the polypeptide sequence of any one of SEQ ID NOs: 329 and 330.

[0048] As used herein, the term “vector” includes a nucleic acid vector, e.g., a DNA vector, such as a plasmid, a RNA vector, virus or other suitable replicon (e.g., viral vector).

[0049] As used herein, the term “water-forming NADH oxidase” refers to an enzyme that is capable of producing (e.g., regenerating) nicotinamide adenine dinucleotide (NAD⁺) from the reduced form of this compound, NADH. A water-forming NADH oxidase is also capable of reducing molecular oxygen (O₂) to water (H₂O). In certain cases, water-forming NADH oxidases may selectively catalyze the oxidation of NADH to NAD⁺. For instance, the water-forming NADH oxidase may exhibit a k_{cat}/K_{M} for NADH that is increased by 10-fold, 20-fold, 30-fold, 40-fold, 50-fold, 60-fold, 70-fold, 80-fold, 90-fold, 100-fold, 200-fold, 300-fold, 400-fold, 500-fold, 600-fold, 700-fold, 800-fold, 900-fold, 1,000-fold, 1,100-fold, 1,200-fold, 1,300-fold, 1,400-fold, 1,500-fold, 1,600-fold, 1,700-fold, 1,800-fold, 1,900-fold, 2,000-fold, 3,000-fold, 4,000-fold, 5,000-fold, 10,000-fold, or more, relative to the k_{cat}/K_{M} exhibited for NADPH. In other cases, water-forming NADH oxidases may be capable of converting another substrate (e.g., NADPH) to its oxidized state (e.g., NADP⁺). Water-forming NADH oxidases may use a cofactor in order to oxidize a particular substrate. For instance, a water-forming NADH oxidase may transfer electrons from a substrate (e.g., NADH or NADPH) to a cofactor (e.g., flavin adenine dinucleotide, FAD) in order to oxidize the substrate. A water-forming NADH oxidase may subsequently transfer electrons from a cofactor to molecular oxygen in order to form water, as determined, e.g., by an oxygen consumption assay, for instance, as described in Example 11 below.

[0050] As used herein, the term “water-forming NADPH oxidase” refers to an enzyme that is capable of producing (e.g., regenerating) nicotinamide adenine dinucleotide phosphate (NADP⁺) from the reduced form of this compound, NADPH. A water-forming NADPH oxidase is also capable of reducing molecular oxygen (O₂) to water (H₂O). In certain cases, water-forming NADPH oxidases may selectively catalyze the oxidation of NADPH to NADP⁺. For instance, the water-forming NADPH oxidase may exhibit a k_{cat}/K_{M} for NADPH that is increased by 10-fold, 20-fold, 30-fold, 40-fold, 50-fold, 60-fold, 70-fold, 80-fold, 90-fold, 100-fold, 200-fold, 300-fold, 400-fold, 500-fold, 600-fold, 700-fold, 800-fold, 900-fold, 1,000-fold, 1,100-fold, 1,200-fold, 1,300-fold, 1,400-fold, 1,500-fold, 1,600-fold, 1,700-fold, 1,800-fold, 1,900-fold, 2,000-fold, 3,000-fold, 4,000-fold, 5,000-fold, 10,000-fold, or more, relative to the k_{cat}/K_{M} exhibited for NADH. In other cases, water-forming NADH oxidases may be capable of converting another substrate (e.g., NADH) to its oxidized state (e.g., NADI. Water-forming NADPH oxidases may use a cofactor in order to oxidize a particular substrate. For instance, a water-forming NADPH oxidase may transfer electrons from a substrate (e.g., NADPH) to a cofactor (e.g., flavin adenine dinucleotide, FAD) in order to oxidize the substrate. A water-forming NADPH oxidase may subsequently transfer electrons from a cofactor to molecular oxygen in order to form water, as determined, e.g., by an oxygen consumption assay, for instance, as described in Example 11 below.

### BRIEF DESCRIPTION OF THE FIGURES

[0051] FIGS. 1A-1E illustrate the biochemical properties of LbNOX with a C-terminal FLAG tag and a cleavable N-terminal hexahistidine (Hisx6) tag produced by overexpression in E. coli. Purified LbNOX-FLAG has a yellow color and a UV-visible absorption spectrum (λₘₐₓ=371 and 444 nm) similar to other FAD-containing enzymes, which can be reduced upon the addition of sodium dithionite (FIG. 1B). (FIG. 1A) Reaction catalyzed by LbNOX. (FIG. 1B) UV-visible spectrum of purified LbNOX. Protein (82.8 μM FAD active sites) in 50 mM NaPi pH 7.5, 150 mM NaCl after purification in oxidized form (solid line) and after addition of excess of sodium dithionite, reduced form (dashed line). Inset: SDS-PAGE of purified LbNOX. (FIG. 1C) Simultaneous measurement of NADH and oxygen consumption by LbNOX as assayed in 50 mM NaPi pH 7.5, 150 mM NaCl at 28° C. NADH (500 μM) and LbNOX (1.8 μg) were added as indicated by arrows. (FIG. 1D) Michaelis-Menten analysis of the NAD(P)H oxidase activity of recombinant LbNOX. Inset: values for Vₘₐₓ and K_{M} for NADH represent the mean±S.D. (error bars) from four independent experiments. (FIG. 1E) The crystal structure of LbNOX. The FAD in stick representation and bound oxygen in red spheres. Inset: The substrate selectivity loops of LbNOX (containing Asp177, Ala178, and Pro184) and glutathione reductase—NADPH complex (containing Arg198 and Arg204) (PDB ID 1GET). Backbone atoms of NAD(P)H binding domains of each protein (residues 147-247 of LbNOX and 167-268 of glutathione reductase) were superimposed using the least square algorithm of COOT. Note that Arg198 and Arg204 of glutathione reductase, which tightly bind the phosphate moiety of NADPH, are replaced in LbNOX with Ala178 and Pro184, respectively. Negatively charged side chain of Asp177 in LbNOX replaces the neutral Val197 of glutathione reductase.

[0052] FIGS. 2A-2C illustrate the expression and activity of LbNOX in mammalian cells. (FIG. 2A) Western blot of LbNOX and mitoLbNOX expression in HeLa Tet3G LbNOX and mitoLbNOX cells after 24-hour treatment with water or 300 ng/ml doxycycline. (FIG. 2B) Subcellular localization of LbNOX and mitoLbNOX in HeLa Tet3G LbNOX and mitoLbNOX cells determined using fluorescence microscopy. Tomm20 is used as a marker of mitochondria. (FIG. 2C) Effect of LbNOX and mitoLbNOX expression in HeLa Tet3G LbNOX and mitoLbNOX cells on basal, piericidin-resistant and antimycin-resistant respiration measured with XF24 extracellular flux analyzer. Mean values±S.D. (error bars) from three independent experiments are shown.

[0053] FIGS. 3A-3D show the effect of LbNOX on compartment specific NAD⁺/NADH ratio, gluconeogenesis and PDH phosphorylation. (FIGS. 3A and 3B) Effect of LbNOX and mitoLbNOX expression in HeLa Tet3G LbNOX and mitoLbNOX cells on total intracellular NAD⁺/NADH ratio (A), intracellular and secreted lactate/pyruvate (B). Mean values±S.E. (error bars) from four independent experiments are shown. (FIG. 3C) Effect of LbNOX and mitoLbNOX expression in HeLa Tet3G LbNOX and mitoLbNOX cells on PDH phosphorylation. (FIG. 3D) Effect of transduction by GFP, LbNOX and mitoLbNOX containing adenoviruses on gluconeogenesis in primary rat hepatocytes. Mean values±S.E. (error bars) from four independent experiments are shown. P value (* p<0.05) was calculated using one tailed ratio t test on non-normalized data using GraphPad Prism software.

[0054] FIGS. 4A and 4B demonstrate that LbNOX fully complements ETC function required for mammalian cell proliferation. (FIG. 4A) Effect of LbNOX and mitoLbNOX expression in HeLa Tet3G LbNOX and mitoLbNOX cells on inhibition of cell proliferation by piericidin, antimycin, chloramphenicol and ethidium bromide. Mean values±S.D. (error bars) from three independent experiments are shown. (FIG. 4B) Effect of pyruvate, oxaloacetate, lactate and malate addition on proliferation of HeLa Tet3G Luciferase cells in the presence or absence of 1 μM piericidin. Mean values±S.E. (error bars) from five independent experiments are shown.

[0055] FIGS. 5A and 5B illustrate the expression (FIG. 5A) and effect on oxygen consumption rate (OCR) (FIG. 5B) of H₂O-forming NADH oxidases from L. brevis, L. lactis, S. pneumoniae, S. mutans and S. hyodysenteriae in HeLa Tet3G cells. Mean values±S.D. (error bars) from three independent experiments are shown.

[0056] FIG. 6 shows the results of a continuous assay to monitor H₂O₂-production by LbNOX. Reaction mixture contained: 50 mM NaPi pH 7.5, 150 mM NaCl buffer, 350 μM NADH, SOD 130U and 100 μM D-glucose at 37° C. At times indicated LbNOX and glucose oxidase were added. Glucose oxidase was used to validate the assay, since this enzyme produces H₂O₂ from oxygen and D-glucose. Rates on H₂O₂-forming activity of LbNOX were compared to rates of NADH disappearance in parallel experiments. It was estimated that around 1.7±0.3% of H₂O₂ is produced by LbNOX (n=4).

[0057] FIG. 7 shows enzyme-monitored turnover traces of LbNOX. The experiment was carried out by monitoring the time dependence of FAD oxidation state via its absorbance at 455 nm in 50 mM NaPi pH7.5 150 mM NaCl buffer at 4° C. Air-saturated LbNOX (1.9, 2.9, 5.6 and 9.18 μM FAD active sites after mixing) and air-saturated solution of NADH (2 mM after mixing). The traces at 455 nm are treated as records of the rate of catalysis as a continuous function of the concentration of O₂ (the limiting substrate).

[0058] FIG. 8 shows O₂ in the active site of LbNOX as determined by X-ray crystallography. 2Fₒ-F_{c} electron density around FAD, His50, Cys82, and oxygen contoured at 1.5 σ. His50, Cys82, FAD, and oxygen are depicted in sticks representation. Dashed lines depict hydrogen bonds.

[0059] FIGS. 9A-9D show the effect of Luciferase expression and doxycycline addition on basal, piericidin-resistant and antimycin-resistant respiration measured with XF24 extracellular flux analyzer (FIG. 9A), NAD⁺/NADH ratio (FIG. 9B), secreted lactate/pyruvate ratio and intracellular lactate/pyruvate ratio (FIG. 9C), and PDH phosphorylation (FIG. 9D). Mean values±S.D. (FIG. 9A) (error bars) or ±S.E.M. (FIGS. 9B and 9C) (error bars) from three (FIG. 9A) or four (FIGS. 9B and 9C) independent experiments are shown.

[0060] FIGS. 10A-10L show the effect of yeast Ndi1 (FIGS. 10A-10D), Luciferase (FIGS. 10E-10H) and pyruvate (FIGS. 10I-10L) on piericidin (FIGS. 10A, 10E, and 10I), antimycin (FIGS. 10B, 10F, and 10J), chloramphenicol (FIGS. 10C, 10G, and 10K) and ethidium bromide (FIGS. 10D, 10H, and 10L) induced proliferative defect in HeLa cells. Mean values±S.D. (FIGS. 10A, 10B, and 10E-10L) or S.E.M. (FIGS. 10C and 10D) (error bars) from three (FIGS. 10A, 10B, and 10E-10L) or five (FIGS. 10C and 10D) independent experiments are shown.

[0061] FIGS. 11A-11D show the effect of yeast Ndi1 (FIG. 11A), Luciferase (FIG. 11B), LbNOX (FIG. 11C) and mitoLbNOX (FIG. 11D) expression on HeLa Tet3G NDI1, Luciferase, LbNOX and mitoLbNOX cell survival, respectively, in the presence of antimycin or piericidin at varying glucose concentrations. Mean values±S.E.M. (error bars) from three independent experiments are shown.

[0062] FIG. 12 shows the effect of NMN and PJ34 on piericidin induced proliferative defect in HeLa Tet3G Luciferase cells. Mean values±S.E. (error bars) from five independent experiments are shown.

[0063] FIG. 13 shows the effect of expression of Luciferase, a water-forming NADH oxidase from eukaryotic organism Giardia intestinalis (hereinafter “GiNOX”), or GiNOX fused to a mitochondrial targeting sequence (mitoGiNOX) on proliferation of HeLa Tet3G cells in the presence or absence of 1 μM antimycin and at various concentrations of pyruvate. Cell number was estimated using fluorescence intensity with CyQUANT cell proliferation kit. Cells were grown in DMEM media without pyruvate supplemented with 10% dialyzed FBS and Luciferase, GiNOX or mitoGiNOX expression was induced by addition of 1 μg/ml doxycycline.

[0064] FIG. 14 shows a sequence alignment of enzymes grouped according to their NAD(P)H substrate specificity. The NAD(P)H oxidases (NOXes) are from the following sources (from top to bottom): L. brevis (“LbNOX”), S. mutans (“SmNOX”), L. sanfranciscensis (“LsNOX”), and G. intestinalis (“GiNOX”). The glutathione reductase sequence shown is from E. coli (“EcGR”). NADPH-specific S. mutans NOX is denoted as “mutSmNOX.” The positions of amino acid residues of LbNOX that were substituted in the design of an NADPH-specific water-forming NADPH oxidase (“TPNOX”) are marked with arrows and numbers. Both the dinucleotide-binding motif and the cofactor specificity loop are boxed on the left side and on the right side of the sequence, respectively. The amino acid substitutions that were made in the design of TPNOX relative to the LbNOX sequence were G159A, D177A, A178R, M179S, and P184R.

[0065] FIG. 15 shows a Michaelis-Menten analysis of the NADPH oxidation reaction catalyzed by TPNOX, which is a quintuple mutant (G159A/D177A/A178R/M179S/P184R) of LbNOX. TPNOX is highly specific towards NADPH (e.g., approximately 1120 fold more reactive with NADPH than with NADH based on respective kat/K_{M} values).

[0066] FIGS. 16A and 16B show the expression and activity of TPNOX and mitoTPNOX in HeLa cells, respectively. FIG. 16A shows the doxycycline-inducible expression of TPNOX and mitoTPNOX in HeLa cells. FIG. 16B shows that doxycycline-inducible expression of TPNOX and mitoTPNOX increases the oxygen consumption rate of HeLa cells. The activity data shown are depicted as the mean±SEM from n=3 independent experiments.

[0067] FIGS. 17A-17C are graphs showing that mitoTPNOX expression complements electron transport chain function required for mammalian cell proliferation. Doxycycline (dox)-inducible expression of mitoTPNOX (FIG. 17C) but not TPNOX (FIG. 17B) or luciferase (FIG. 17A) rescues proliferative defect of HeLa cells caused by treatment with 1 μM of Complex I inhibitor piericidin (pier). Mean±SEM from n=4 independent experiments.

### DETAILED DESCRIPTION

[0068] This invention is based in part on the surprising discovery that water-forming NADH oxidases can be used to alleviate a defective mammalian mitochondrial respiratory chain by oxidizing NADH and transferring electrons directly to molecular oxygen. In this way, NAD⁺ is regenerated and is made available for important cellular processes. Rather than replacing or bypassing individual complexes of the respiratory chain in order to preserve the chemiosmotic gradient for ATP production, the water-forming NADH oxidases for use in the compositions and methods of the invention restore a significant yet oft-overlooked function of the respiratory chain: the recycling of NADH to NAD⁺. Surprisingly, restoration of NAD⁺ using water-forming NADH oxidases in the cytosol or mitochondria, even without directly restoring ATP production provided by the mitochondrial respiratory chain, can mitigate the metabolic inactivity characteristic of mammalian cells harboring a dysfunctional respiratory chain. Expression of water forming NADH oxidases, whether in the cytosol or in mitochondria, promotes the regeneration of NAD+, hence restoring one of the oft overlooked functions of the respiratory chain. Flux through important metabolic processes, such as nucleotide biosynthesis and glycolysis, can be restored by regenerating NAD⁺, and, unexpectedly, this nascent activity can rescue a mammalian cell (e.g., a human cell) containing a defective mitochondrial respiratory chain. This discovery is non-intuitive, since a complete bypass of the respiratory chain by transferring electrons directly from NADH to oxygen would be predicted to be devastating to a cell, as it does not generate a proton gradient that can be used to catalyze ATP production at complex V, and the diminished mitochondrial production of ATP has long been considered the chief underlying cause of diseases associated with a dysfunctional respiratory chain. The discovery that underlies this invention is that it is not insufficient ATP that drives pathology, but rather inadequate regeneration of NAD⁺, either within mitochondria or in the cytosol, with ensuing downstream metabolic and cellular consequences, that causes mitochondrial disease.

[0069] NAD⁺ is an important cofactor that participates in many biochemical processes, including regulating protein folding, nucleotide biosynthesis, fatty acid biosynthesis, fatty acid oxidation, bile acid biosynthesis, porphyrin metabolism, glycolysis, alcohol detoxification, and cellular respiration, among others. Water-forming NADH oxidases can be used to restore NAD⁺ reserves and quench excess NADH that accumulates in cells containing stalled respiratory chains. These enzymes do not naturally occur in mammalian cells. Rather, water-forming NADH oxidases have evolved in lower-order organisms, such as bacteria and single-celled eukaryotes, in order to restore NADH to its oxidized state or to keep oxygen tensions low in organisms that cannot tolerate high oxygen.

[0070] Gene therapy and protein therapy approaches to remedying mitochondrial pathology have focused on trying to replace individual mutant or otherwise defective components of the respiratory chain. However, more than 150 different nuclear and mitochondrial genes can be mutated to give rise to defects in the respiratory chain. Rather than targeting a specific component of the respiratory chain, water-forming NADH oxidases instead can act as a protein prosthesis that bypasses the defective respiratory chain entirely and provides an alternative pathway for NAD⁺ regeneration. Thus, these enzymes are particularly useful for treating patients suffering from mixed respiratory chain deficiencies in which defects in complexes I, III, and IV are observed, as well as patients suffering from mutations in proteins that are responsible for the assembly, maintenance, or turnover of the respiratory chain. Water-forming NADH oxidases thus alleviate pathology by a mechanism very distinct from that of other oxidoreductases, such as yeast NDI1 and AOX. These enzymes need to be targeted to mitochondria and function by effectively replacing individual complexes of the respiratory chain, and they work by direct maintenance of a chemiosmotic gradient that promotes oxidative phosphorylation at complex V. Water-forming NADH oxidases do not need to be tailored to an individual complex of the respiratory chain that is defective in a given patient that presents with a particular disorder. Instead, these enzymes are capable of bypassing the defective respiratory chain entirely in order to restore oxidative balance, regardless of the unique components of the respiratory chain that may be deficient in a specific patient.

[0071] Water-forming NADH oxidases, as well as biologically active fragments thereof that maintain enzymatic activity, can be used for a broad array of applications. For example, these enzymes can be administered to a patient that is suffering from a defect in the mitochondrial respiratory chain in order to treat the disease, or to reduce one or more symptoms of the disease, by bypassing the defective components entirely. This can be achieved using any of several different strategies. For instance, a mammalian cell that has been engineered to express a water-forming NADH oxidase can be administered to such a patient. Alternatively, a polynucleotide encoding the enzyme can be administered to a patient, e.g., in the form of a vector. If desired, the vector may be one promotes the integration of the polynucleotide into the genome of the patient. The enzyme can also be administered directly to a patient, and a variety of strategies have been developed for administration of whole proteins that can be used to facilitate delivery of these enzymes to the appropriate cellular target.

[0072] Water-forming NADH or NADPH oxidases can be used as a research tool, for instance, in order to elucidate the effect of an exogenous water-forming oxidase on cell biology. Water-forming NADH oxidases can be used, for example, to study the role of the respiratory chain in the pathophysiology of various human diseases. Water-forming NADH oxidases can be used, e.g., to decouple the dual roles of the respiratory chain and analyze the effect of NADH oxidation in the absence of ATP production. Water-forming NADH and NADPH oxidases can also be used, for example, to study the effect of changes of the ratio of NAD⁺ to NADH or NADP⁺ to NADPH on different biological processes. The sections that follow will discuss compositions containing water-forming NADH or NADPH oxidases and methods for use thereof.

[0073] Biochemical Properties of Water-Forming NADH and NADPH Oxidases

[0074] The water-forming NADH or NADPH oxidases for use in the compositions and methods of the invention (for instance, a water-forming NADH oxidase having the amino acid sequence of any one of SEQ ID NOs: 1-273, such as a water-forming NADH oxidase having the amino acid sequence of any one of SEQ ID NOs: 1-5, or a water-forming NADPH oxidase having the amino acid sequence of SEQ ID NO: 329 or 330) can exhibit different substrate selectivity profiles. For example, these enzymes can catalyze the oxidation of NADH or NADPH to NAD⁺ or NADP⁺ and the concomitant reduction of molecular oxygen, O₂, to water (H₂O). The enzymes for use in the compositions and methods of the invention can be used, for example, to selectively catalyze the oxidation of NADH over NADPH, or to selectively catalyze the oxidation of NADPH over NADH. The water-forming NADH or NADPH oxidases for use in the compositions and methods of the invention may alternatively be pan-selective, and can therefore be used to catalyze the oxidation of NADH and NADPH.

[0075] The water-forming NADH or NADPH oxidases for use in the compositions and methods of the invention (for instance, a water-forming NADH oxidase having the amino acid sequence of any one of SEQ ID NOs: 1-273, such as a water-forming NADH oxidase having the amino acid sequence of any one of SEQ ID NOs: 1-5, or a water-forming NADPH oxidase having the amino acid sequence of SEQ ID NO: 329 or 330) contain binding sites for NADH or NADPH, and the molecular association of these enzymes with NADH or NADPH is characterized by Michaelis constant (K_{M}). These enzymes generally exhibit a K_{M} for NADH or NADPH of between 1 μM and 500 μM (e.g., 500 μM, 490 μM, 480 μM, 470 μM, 460 μM, 450 μM, 440 μM, 430 μM, 420 μM, 410 μM, 400 μM, 390 μM, 380 μM, 370 μM, 360 μM, 350 μM, 340 μM, 330 μM, 320 μM, 310 μM, 300 μM, 290 μM, 280 μM, 270 μM, 260 μM, 250 μM, 240 μM, 230 μM, 220 μM, 200 μM, 190 μM, 180 μM, 170 μM, 160 μM, 150 μM, 140 μM, 130 μM, 120 μM, 110 μM, 100 μM, 95 μM, 90 μM, 85 μM, 80 μM, 75 μM, 70 μM, 65 μM, 60 μM, 55 μM, 50 μM, 45 μM, 40 μM, 35 μM, 30 μM, 25 μM, 20 μM, 15 μM, 10 μM, 5 μM, or 1 μM).

[0076] The water-forming NADH or NADPH oxidases for use in the compositions and methods of the invention (for instance, a water-forming NADH oxidase having the amino acid sequence of any one of SEQ ID NOs: 1-273, such as a water-forming NADH oxidase having the amino acid sequence of any one of SEQ ID NOs: 1-5, or a water-forming NADPH oxidase having the amino acid sequence of SEQ ID NO: 329 or 330) also bind molecular oxygen as a substrate for reduction, and generally exhibit a K_{M} for O₂ between 1 μM and 500 μM (e.g., 500 μM, 490 μM, 480 μM, 470 μM, 460 μM, 450 μM, 440 μM, 430 μM, 420 μM, 410 μM, 400 μM, 390 μM, 380 μM, 370 μM, 360 μM, 350 μM, 340 μM, 330 μM, 320 μM, 310 μM, 300 μM, 290 μM, 280 μM, 270 μM, 260 μM, 250 μM, 240 μM, 230 μM, 220 μM, 200 μM, 190 μM, 180 μM, 170 μM, 160 μM, 150 μM, 140 μM, 130 μM, 120 μM, 110 μM, 100 μM, 95 μM, 90 μM, 85 μM, 80 μM, 75 μM, 70 μM, 65 μM, 60 μM, 55 μM, 50 μM, 45 μM, 40 μM, 35 μM, 30 μM, 25 μM, 20 μM, 15 μM, 10 μM, 5 μM, or 1 μM). For example, these enzymes may exhibit a K_{M} for O₂ of below 20 μM (which is the approximate concentration of molecular oxygen in human venous blood).

[0077] Water-forming NADH oxidases (for instance, a water-forming NADH oxidase having the amino acid sequence of any one of SEQ ID NOs: 1-273, such as a water-forming NADH oxidase having the amino acid sequence of any one of SEQ ID NOs: 1-5) may produce hydrogen peroxide (H₂O₂) as a byproduct of the reduction of molecular oxygen to water. For example, the enzymes may produce between 0.1% and 50% of H₂O₂ by mole relative to H₂O production (e.g., 50%, 45%, 40%, 35%, 30%, 25%, 20%, 15%, 10%, 5%, 2%, 1%, 0.5%, or 0.1%).

[0078] Water-forming NADH or NADPH oxidases (for instance, a water-forming NADH oxidase having the amino acid sequence of any one of SEQ ID NOs: 1-273, such as a water-forming NADH oxidase having the amino acid sequence of any one of SEQ ID NOs: 1-5, or a water-forming NADPH oxidase having the amino acid sequence of SEQ ID NO: 329 or 330) are further capable of increasing the consumption of oxygen when introduced into mammalian cells, including human cells. Expression of these enzymes in mammalian cells results in an increase in oxygen consumption relative to cells of the same type and cultured under similar conditions in the absence of the exogenous water-forming NADH or NADPH oxidase (see, e.g., FIG. 5). For example, the enzymes can increase oxygen consumption in a cell by 1.1-fold to 10-fold (e.g., 1.1-fold, 1.2-fold, 1.3-fold, 1.4-fold, 1.5-fold, 1.6-fold, 1.7-fold, 1.8-fold, 1.9-fold, 2.0-fold, 2.1-fold, 2.2-fold, 2.3-fold, 2.4-fold, 2.5-fold, 2.6-fold, 2.7-fold, 2.8-fold, 2.9-fold, 3.0-fold, 3.5-fold, 4.0-fold, 4.5-fold, 5.0-fold, 5.5-fold, 6.0-fold, 7.0-fold, 8.0-fold, 9.0-fold, and 10.0-fold) relative to a cell lacking the enzyme. In certain cases, a water-forming NADH or NADPH oxidase can increase oxygen consumption in a cell by, e.g., 1.5-10-fold, 1.5-9-fold, 1.5-8-fold, 1.5-7-fold, 1.5-6-fold, 1.5-5-fold, 1.5-4-fold, 1.5-3-fold, or 1.5-2-fold. In alternative cases, a water-forming NADH or NADPH oxidase can increase oxygen consumption in a cell by, e.g., 2-10-fold, 3-10-fold, 4-10-fold, 5-10-fold, 6-10-fold, 7-10-fold, 8-10-fold, or 9-10-fold. In other cases, a water-forming NADH or NADPH oxidase can increase oxygen consumption in a cell by, e.g., 2-9-fold, 3-8-fold, 4-7-fold, or 5-6-fold.

[0079] Water-forming NADH or NADPH oxidases for use in the compositions and methods of the invention (for instance, a water-forming NADH oxidase having the amino acid sequence of any one of SEQ ID NOs: 1-273, such as a water-forming NADH oxidase having the amino acid sequence of any one of SEQ ID NOs: 1-5, or a water-forming NADPH oxidase having the amino acid sequence of SEQ ID NO: 329 or 330) are those that are capable of restoring NADH or NADPH to its oxidized state (NAD⁺ or NADP⁺), and thus increasing the ratio of NAD⁺ or NADP⁺ to NADH or NADPH. Importantly, water-forming NADH or NADPH oxidases do not need to be targeted to a particular sub-cellular organelle in order to restore NAD⁺ or NADP⁺ (see, e.g., Examples 3, 4, 6, 7, and 11).

[0080] For instance, while water-forming NADH oxidases can be targeted to various organelles, these enzymes are also functional in the cytosol, as they promote such activities as oxygen consumption, gluconeogenesis, and cell growth even when not directed to the mitochondria. In this way, water-forming NADH oxidases are distinct from such proteins as NDI1 and AOX, which must localize to the mitochondria in order to function. Water-forming NADH oxidases are capable of increasing the ratio of NAD⁺ to NADH in mammalian cells (e.g., human cells) relative to cells of the same type and cultured under similar conditions in the absence of the exogenous water-forming NADH oxidase. For example, the enzymes can increase the ratio of NAD⁺ to NADH in a cell by 1.1-fold to 10-fold (e.g., 1.1-fold, 1.2-fold, 1.3-fold, 1.4-fold, 1.5-fold, 1.6-fold, 1.7-fold, 1.8-fold, 1.9-fold, 2.0-fold, 2.1-fold, 2.2-fold, 2.3-fold, 2.4-fold, 2.5-fold, 2.6-fold, 2.7-fold, 2.8-fold, 2.9-fold, 3.0-fold, 3.5-fold, 4.0-fold, 4.5-fold, 5.0-fold, 5.5-fold, 6.0-fold, 7.0-fold, 8.0-fold, 9.0-fold, and 10.0-fold) as measured by analysis of NAD⁺ or NADP⁺ and NADH or NADPH in cellular extracts relative to a cell lacking the enzyme. In certain cases, a water-forming NADH or NADPH oxidase can increase the ratio of NAD⁺ to NADH or NADP⁺ to NADPH in a cell by, e.g., 1.5-10-fold, 1.5-9-fold, 1.5-8-fold, 1.5-7-fold, 1.5-6-fold, 1.5-5-fold, 1.5-4-fold, 1.5-3-fold, or 1.5-2-fold. In some cases, a water-forming NADH oxidase can increase the ratio of NAD⁺ to NADH in a cell by, e.g., 2-10-fold, 3-10-fold, 4-10-fold, 5-10-fold, 6-10-fold, 7-10-fold, 8-10-fold, or 9-10-fold. In some cases, a water-forming NADH oxidase can increase the ratio of NAD⁺ to NADH in a cell by, e.g., 2-9-fold, 3-8-fold, 4-7-fold, or 5-6-fold. Stated another way, water-forming NADH oxidases care capable of restoring redox balance in a cell exhibiting an elevated ratio of NADH to NAD⁺ by oxidizing NADH even in the absence of a functional respiratory chain, thereby lowering the ratio of NADH to NAD⁺.

[0081] For example, water-forming NADH oxidases may lower the intracellular ratio of NADH to NAD⁺ to between 100:1 and 0.0001:1 (e.g., 100:1, 10:1, 1:1, 0.01:1, 0.001:1, 0.0001:1). Additionally, water-forming NADH oxidases for use in the compositions and methods of the invention are capable of increasing the absolute concentration of NAD⁺ and lowering the absolute concentration of NADH in the cytoplasm of a mammalian cell (e.g., a human cell) and in specific sub-cellular organelles, such as the mitochondria. For example, water-forming NADH oxidases can increase the absolute concentration of NAD⁺ in the cytoplasm or in a particular organelle (e.g., the mitochondria) by between 0.001 μM and 1 mM (e.g., by 0.001 μM, 0.01 μM, 0.1 μM, 1 μM, 10 μM, 100 μM, or 1 mM). As such, water-forming NADH oxidases can lower the absolute concentration of NADH in the cytoplasm or in a particular organelle (e.g., the mitochondria) by between, for example, 0.001 μM and 1 mM (e.g., by 0.001 μM, 0.01 μM, 0.1 μM, 1 μM, 10 μM, 100 μM, or 1 mM).

[0082] Structural Characteristics of Water-Forming NADH Oxidases

[0083] Water-forming NADH oxidases are a product of evolution in lower-order organisms, such as prokaryotes and single-celled eukaryotes, in order to provide a means of regenerating NAD⁺ in the absence of a respiratory chain. These enzymes are naturally occurring in a wide variety of single-celled organisms and, despite the phylogenetic diversity of these proteins, water-forming NADH oxidases share many important structural features. This molecular similarity is consistent with the principle function of these enzymes, the consumption of oxygen for the restoration of NAD⁺, which is shared by all water-forming NADH oxidases. Water-forming NADH oxidases for use in the compositions and methods of the invention can be identified based on the presence of one or more (or all) of the following domains: a pyridine nucleotide-disulfide oxidoreductase domain, a thioredoxin domain, an alkyl hydroperoxide domain, and a short-chain dehydrogenase/reductase domain. The structural and functional properties of these domains are described in the sections that follow.

[0084] Pyridine Nucleotide-Disulfide Oxidoreductase Domain

[0085] There are certain structural domains that are native to water-forming NADH oxidases. These include conserved domains that execute important functions in the catalytic cycle of a water-forming NADH oxidase. For instance, the water-forming NADH oxidases of this invention may contain a pyridine nucleotide-disulfide oxidoreductase domain. This domain contains an NADH-binding site that is located within a larger flavin adenine dinucleotide (FAD) binding pocket. This domain is important for enzymatic activity, since FAD is a cofactor that is used by many water-forming NADH oxidases in the mechanism of NADH oxidation. The sequence of this domain may vary depending on the organism of origin, but these sequences typically exhibit at least 85% sequence identity (e.g., 85%, 90%, 95%, 97%, 99%, or 100% sequence identity) to the representative amino acid sequence of the pyridine nucleotide-disulfide oxidoreductase domain that is provided in SEQ ID NO: 274, derived from Salmonella enterica.

[0086] Thioredoxin Fold Domain

[0087] Water-forming NADH oxidases for use in the compositions and methods of the invention (for instance, a water-forming NADH oxidase having the amino acid sequence of any one of SEQ ID NOs: 1-273, such as a water-forming NADH oxidase having the amino acid sequence of any one of SEQ ID NOs: 1-5) may also contain a thioredoxin (TRX) fold domain, which is derived from the TRX-like protein superfamily. A TRX fold domain may have an amino acid sequence that has at least 85% sequence identity (e.g., 85%, 90%, 95%, 97%, 99%, or 100% sequence identity) to the representative amino acid sequence of SEQ ID NO: 275, derived from Echinococcus multilocularis. A TRX fold domain may contain a redox active CXXC sequence, wherein X is any amino acid. The thiol functionality of the flanking cysteine residues is used in the catalytic cycle of enzymes containing this domain, as these moieties can be reversibly oxidized and reduced in order to transfer electrons from a substrate to an oxidizing agent, such as molecular oxygen.

[0088] Alkyl Hydroperoxide Reductase F Subunit (AhpF) N-Terminal Domain (NTD)

[0089] Water-forming NADH oxidases for use in the compositions and methods of the invention (for instance, a water-forming NADH oxidase having the amino acid sequence of any one of SEQ ID NOs: 1-273, such as a water-forming NADH oxidase having the amino acid sequence of any one of SEQ ID NOs: 1-5) may alternatively contain an alkyl hydroperoxide reductase F subunit (AhpF) N-terminal domain (NTD). This domain is a subdomain within the TRX-fold superfamily. An AhpF N-terminal domain may have an amino acid sequence that has at least 85% sequence identity (e.g., 85%, 90%, 95%, 97%, 99%, or 100% sequence identity) to the representative amino acid sequence of SEQ ID NO: 276, derived from Lactobacillus fermentum. AhpF is a homodimeric, FAD-requiring enzyme that catalyzes the reduction of the peroxiredoxin AhpC and the concurrent oxidation of NADH. The N-terminal domain of AhpF contains two continuous TRX-fold subdomains. It may also contain a catalytic core with binding sites for FAD and NADH, as well as an active site disulfide. The postulated catalytic mechanism of enzymes that contain this domain includes a sequential transfer of electrons from NADH to the catalytic core of AhpF and subsequently to the NTD of AhpF, AhpC and ultimately to peroxide substrates. The N-terminal TRX-fold subdomain of AhpF NTD is redox inactive, but is proposed to contain an important residue that aids in the catalytic function of the redox-active CXXC motif contained in the C-terminal TRX-fold subdomain.

[0090] Short-Chain Dehydrogenases/Reductases (SDRs)

[0091] Water-forming NADH oxidases for use in the compositions and methods of the invention (for instance, a water-forming NADH oxidase having the amino acid sequence of any one of SEQ ID NOs: 1-273, such as a water-forming NADH oxidase having the amino acid sequence of any one of SEQ ID NOs: 1-5) may additionally contain short-chain dehydrogenases/reductase (SDR) domains. A SDR domain may have an amino acid sequence that has at least 85% sequence identity (e.g., 85%, 90%, 95%, 97%, 99%, or 100% sequence identity) to the representative amino acid sequence of SEQ ID NO: 277, derived from Dinoroseobacter shibae. SDRs may feature several structural motifs, including a conserved ensemble of alpha helices surrounding a central beta sheet (termed a Rossmann fold) and an NADH-binding site that can also accommodate NADPH. Classical SDRs contain a TGXXX[AG]XG motif (SEQ ID NO: 278) that is used for the binding and recognition of oxidative cofactors, as well as a YXXXK active site motif, wherein the N-terminal tyrosine in this sequence participates in the catalytic mechanism of oxidation. Serine and asparagine residues N-terminal to this active site sequence may also contribute to the oxidative catalysis. The postulated mechanism of the redox reactions catalyzed by this domain proceeds by a hydride transfer from NADH (or NADPH) facilitated by the conserved tyrosine and lysine residues.

[0092] Rational Design of NADH-Specific and NADPH-Specific Water-Forming NADH or NADPH Oxidases

[0093] The invention is additionally based in part on the discovery of a platform for rationally engineering substrate-selective water-forming NADH or NADPH oxidases. For instance, one can use the sequence of a NADH-specific water-forming NADH oxidase to design a NADPH-specific water-forming NADPH oxidase using this paradigm. As shown in FIG. 1E, the water-forming NADH oxidase of L. brevis (LbNOX) contains an aspartic acid residue at amino acid position 177, which is located within the cofactor specificity loop of the enzyme. Removing the anionic substituent and diminishing the steric demand at this and neighboring positions in LbNOX (or equivalent positions in other NADH-specific water-forming NADH oxidases, e.g., as determined by sequence alignment, shown in FIG. 14, or by structural overlay or homology modeling methods known in the art) alleviates repulsive intermolecular interactions between the oxidase and the 2′-phosphate moiety of NADPH. These changes promote the binding of NADPH to the enzyme. This can be done, for instance, by substitution of the aspartic acid residue with an amino acid that is electrostatically neutral at physiological pH and/or that contains a substituent with less steric volume at this position.

[0094] NADPH-specific TPNOX was designed by replacing the Asp177 residue of LbNOX with an alanine residue, thereby alleviating steric hindrance to NADPH binding. An arginine substitution was made at positions 178 and 184 of the oxidase. A serine substitution was additionally made at residue 179, which provides a hydrogen bond-donating substituent capable of favorably interacting with the 2′-phosphate of NADPH.

[0095] Additionally, the dinucleotide-binding motif of water-forming NADH oxidases can be modified so as to impart these enzymes with altered substrate specificity. For instance, a NADH-specific water-forming NADH oxidase, such as LbNOX, can be converted to a NADPH-specific water-forming NADPH oxidase by incorporating an alanine or serine residue at position 159 of LbNOX, or in an equivalent position in other NADH-specific water-forming NADH oxidases (e.g., as determined by sequence alignment, shown below, or by structural overlay or homology modeling methods known in the art).

[0096] This protein design platform can also be used to engineer NADH-specific water-forming NADH oxidases starting from an NADPH-specific water-forming NADPH oxidase. For instance, one can incorporate residues with an anionic side chain at physiological pH, such as aspartic acid and glutamic acid, residues containing sterically hindered side-chains, or residues containing side-chains that lack hydrogen bond donors within the cofactor-specificity loop of a NADH-specific water-forming NADH oxidase to convert the enzyme into a NADPH-specific water-forming NADPH oxidase. Additionally or alternatively, one can impart NADH selectivity to a NADPH-selective water-forming NADPH oxidase by replacing an alanine or serine residue at the position described above in the dinucleotide binding motif with a glycine residue. This restores the GXGXXG dinucleotide-binding motif observed in NADH-specific water-forming NADH oxidases, such as LbNOX and that of S. mutans (“SmNOX”), as shown in FIG. 14 and described in Example 11 below.

[0097] Sources of Water-Forming NADH and NADPH Oxidases

[0098] Water-forming NADH or NADPH oxidases and biologically active fragments thereof for use in the invention can be isolated from several sources, including lower-order organisms, and can be used as therapeutic enzymes in the treatment of human diseases, and as research tools for investigating the function of the respiratory chain. Water-forming NADH or NADPH oxidases for use in the compositions and methods of the invention include, e.g., enzymes that are capable of oxidizing NADH or NADPH to NAD⁺ or NADP⁺ and concurrently reducing molecular oxygen to water. Water-forming NADH or NADPH oxidases include those that are capable of selectively binding and oxidizing NADH and those capable of selectively binding and oxidizing NADPH. Water-forming NADH or NADPH oxidases can be isolated from a wide array of non-mammalian organisms, including, without limitation, bacteria and single-celled eukaryotes. Non-limiting examples of organisms from which the enzymes for use in the compositions and methods of the invention may be isolated include the following species (the sequences of NADH or NADPH oxidases derived therefrom are presented in SEQ ID NOs: 1-273): Lactobacillus brevis, Lactococcus lactis, Streptococcus pneumoniae, Streptococcus mutans, Serpulina hyodysenteriae, Clostridium aminovalericum, Clostridium bolteae ATCC BAA-613, Clostridium scindens ATCC 35704, Anaerostipes caccae DSM 14662, Bifidobacterium animalis subsp. lactis BB-12, Bifidobacterium bifidum, Bifidobacterium bifidum CAG:234, Bifidobacterium bifidum PRL2010, Bifidobacterium breve, Bifidobacterium breve 12L, Bifidobacterium breve 2L, Bifidobacterium breve 31L, Bifidobacterium breve 689b, Bifidobacterium breve JCM 7017, Bifidobacterium breve JCM 7019, Bifidobacterium breve NCFB 2258, Bifidobacterium breve S27, Bifidobacterium breve UCC2003, Enterococcus faecalis CBRD01, Lactococcus lactis subsp. cremoris UC509.9, Lactococcus lactis subsp. lactis KF147, Oribacterium sinus, Streptococcus equi subsp. zooepidemicus MGCS10565, Streptococcus infantarius subsp. infantarius ATCC BAA-102, Streptococcus macedonicus ACA-DC 198, Streptococcus mitis, Streptococcus mitis SK321, Streptococcus mitis SK564, Streptococcus mitis SK597, Streptococcus mutans 11A1, Streptococcus mutans 11SSST2, Streptococcus mutans 11VS1, Streptococcus mutans 14D, Streptococcus mutans 15JP3, Streptococcus mutans 15VF2, Streptococcus mutans 11D3, Streptococcus mutans 1SM1, Streptococcus mutans 21, Streptococcus mutans 24, Streptococcus mutans 2ST1, Streptococcus mutans 2VS1, Streptococcus mutans 3SN1, Streptococcus mutans 4SM1, Streptococcus mutans 4VF1, Streptococcus mutans 5DC8, Streptococcus mutans 55M3, Streptococcus mutans 66-2A, Streptococcus mutans 81D3, Streptococcus mutans A19, Streptococcus mutans A9, Streptococcus mutans AC4446, Streptococcus mutans ATCC 25175, Streptococcus mutans B, Streptococcus mutans G123, Streptococcus mutans GS-5, Streptococcus mutans KK21, Streptococcus mutans KK23, Streptococcus mutans LJ23, Streptococcus mutans M21, Streptococcus mutans M230, Streptococcus mutans M2A, Streptococcus mutans N29, Streptococcus mutans N3209, Streptococcus mutans N34, Streptococcus mutans N66, Streptococcus mutans NCTC 11060, Streptococcus mutans NFSM1, Streptococcus mutans NFSM2, Streptococcus mutans NLML1, Streptococcus mutans NLML4, Streptococcus mutans NLML5, Streptococcus mutans NLML8, Streptococcus mutans NLML9, Streptococcus mutans NMT4863, Streptococcus mutans NN2025, Streptococcus mutans NV1996, Streptococcus mutans NVAB, Streptococcus mutans OMZ175, Streptococcus mutans PKUSS-HG01, Streptococcus mutans PKUSS-LG01, Streptococcus mutans R221, Streptococcus mutans S1B, Streptococcus mutans SA38, Streptococcus mutans SA41, Streptococcus mutans SF1, Streptococcus mutans SF12, Streptococcus mutans SF14, Streptococcus mutans SM1, Streptococcus mutans SM4, Streptococcus mutans SM6, Streptococcus mutans ST1, Streptococcus mutans ST6, Streptococcus mutans T4, Streptococcus mutans 0138, Streptococcus mutans U2A, Streptococcus mutans U2B, Streptococcus mutans UA159, Streptococcus mutans UA159-FR, Streptococcus mutans W6, Streptococcus oralis, Streptococcus oralis ATCC 35037, Streptococcus pneumoniae 3063-00, Streptococcus pneumoniae 4027-06, Streptococcus pneumoniae 4075-00, Streptococcus pneumoniae 5185-06, Streptococcus pneumoniae 5652-06, Streptococcus pneumoniae 5787-06, Streptococcus pneumoniae 6735-05, Streptococcus pneumoniae 6901-05, Streptococcus pneumoniae 6963-05, Streptococcus pneumoniae 7286-06, Streptococcus pneumoniae 7533-05, Streptococcus pneumoniae 7879-04, Streptococcus pneumoniae 8190-05, Streptococcus pneumoniae ECC 3510, Streptococcus pneumoniae England14-9, Streptococcus pneumoniae EU-NP01, Streptococcus pneumoniae EU-NP02, Streptococcus pneumoniae EU-NP03, Streptococcus pneumoniae EU-NP04, Streptococcus pneumoniae EU-NP05, Streptococcus pneumoniae GA02254, Streptococcus pneumoniae GA02270, Streptococcus pneumoniae GA02506, Streptococcus pneumoniae GA02714, Streptococcus pneumoniae GA04175, Streptococcus pneumoniae GA05248, Streptococcus pneumoniae GA05578, Streptococcus pneumoniae GA06083, Streptococcus pneumoniae GA07228, Streptococcus pneumoniae GA07643, Streptococcus pneumoniae GA07914, Streptococcus pneumoniae GA08780, Streptococcus pneumoniae GA08825, Streptococcus pneumoniae GA11304, Streptococcus pneumoniae GA11426, Streptococcus pneumoniae GA11856, Streptococcus pneumoniae GA13224, Streptococcus pneumoniae GA13338, Streptococcus pneumoniae GA13430, Streptococcus pneumoniae GA13499, Streptococcus pneumoniae GA14688, Streptococcus pneumoniae GA16531, Streptococcus pneumoniae GA17301, Streptococcus pneumoniae GA18068, Streptococcus pneumoniae GA18523, Streptococcus pneumoniae GA19101, Streptococcus pneumoniae GA19690, Streptococcus pneumoniae GA19923, Streptococcus pneumoniae GA40183, Streptococcus pneumoniae GA40410, Streptococcus pneumoniae GA40563, Streptococcus pneumoniae GA41410, Streptococcus pneumoniae GA41538, Streptococcus pneumoniae GA43257, Streptococcus pneumoniae GA43264, Streptococcus pneumoniae GA43265, Streptococcus pneumoniae GA44128, Streptococcus pneumoniae GA44194, Streptococcus pneumoniae GA44288, Streptococcus pneumoniae GA44378, Streptococcus pneumoniae GA44386, Streptococcus pneumoniae GA44452, Streptococcus pneumoniae GA44500, Streptococcus pneumoniae GA44511, Streptococcus pneumoniae GA47033, Streptococcus pneumoniae GA47179, Streptococcus pneumoniae GA47210, Streptococcus pneumoniae GA47281, Streptococcus pneumoniae GA47360, Streptococcus pneumoniae GA47373, Streptococcus pneumoniae GA47388, Streptococcus pneumoniae GA47439, Streptococcus pneumoniae GA47461, Streptococcus pneumoniae GA47502, Streptococcus pneumoniae GA47522, Streptococcus pneumoniae GA47597, Streptococcus pneumoniae GA47628, Streptococcus pneumoniae GA47751, Streptococcus pneumoniae GA47760, Streptococcus pneumoniae GA47976, Streptococcus pneumoniae GA49138, Streptococcus pneumoniae GA49194, Streptococcus pneumoniae GA49447, Streptococcus pneumoniae GA49542, Streptococcus pneumoniae GA52612, Streptococcus pneumoniae GA54644, Streptococcus pneumoniae NorthCarolina6A-23, Streptococcus pneumoniae NP070, Streptococcus pneumoniae NP112, Streptococcus pneumoniae NP127, Streptococcus pneumoniae NP141, Streptococcus pneumoniae NP170, Streptococcus pneumoniae SPAR27, Streptococcus pneumoniae SPAR48, Streptococcus pneumoniae SPAR55, Streptococcus pneumoniae SPAR95, Streptococcus pyogenes, Streptococcus pyogenes A20, Streptococcus pyogenes AA216, Streptococcus pyogenes AA472, Streptococcus pyogenes Alab49, Streptococcus pyogenes HKU QMH11M0907901, Streptococcus pyogenes JRS4, Streptococcus pyogenes M1 476, Streptococcus pyogenes M1 GAS, Streptococcus pyogenes MGAS10270, Streptococcus pyogenes MGAS10394, Streptococcus pyogenes MGAS10750, Streptococcus pyogenes MGAS2096, Streptococcus pyogenes MGAS2111, Streptococcus pyogenes MGAS5005, Streptococcus pyogenes MGAS6180, Streptococcus pyogenes MGAS9429, Streptococcus pyogenes SS1447, Streptococcus ratti FA-1=DSM 20564, Streptococcus salivarius K12, Streptococcus sinensis, Streptococcus sp. HSISB1, Streptococcus sp. HSISS1, Streptococcus sp. HSISS4, Streptococcus thermophilus, Streptococcus thermophilus CAG:236, Streptococcus thermophilus CNRZ1066, Streptococcus thermophilus JIM 8232, Streptococcus thermophilus LMG 18311, Streptococcus thermophilus MN-ZLW-002, Streptococcus thermophilus MTCC 5460, Streptococcus thermophilus MTCC 5461, Streptococcus thermophilus ND03, Aeromonas hydrophila 4AK4, Aeromonas media WS, Aeromonas salmonicida subsp. salmonicida A449, Aeromonas veronii 8565, Bacillus cereus G9241, Borrelia afzelii PKo, Borrelia crocidurae str. Achema, Borrelia duttonii Ly, Borrelia garinii PBi, Borrelia recurrentis A1, Intestinibacter bartlettii DSM 16795, Lactobacillus Sanfranciscensis, Lactococcus lactis subsp. cremoris, Lactococcus lactis subsp. cremoris MG1363, Leptotrichia hofstadii F0254, Streptococcus agalactiae A909, Streptococcus agalactiae CF01173, Streptococcus agalactiae FSL S3-026, Streptococcus agalactiae GB00112, Streptococcus agalactiae SS1014, Streptococcus agalactiae STIR-CD-17, Streptococcus agalactiae Z00910, Vibrio campbellii HY01, Clostridium aminovalericum NRIC0223, Lactobacillus rhamnosus, Lactobacillus rhamnosus ATCC 53103, Lactococcus lactis MG1363, Streptococcus agalactiae, Streptococcus mutans NCBI 11723, Enterococcus faecalis, Giardia lamblia, Giardia intestinalis, Trichomonas vaginalis, and Synechocystis sp. Water-forming NADH oxidases for use in the compositions and methods of the invention also include those derived from eukaryotic organisms, as well as enzymes that utilize cofactors other than FAD, such as flavodiiron proteins. Additional examples of water-forming NADH oxidases the can be used in the compositions and methods of the invention are provided in Tables 1 and 2 below:

TABLE 1
Exemplary water-forming NADH oxidases
derived from eukaryotic organisms

| | | GenBank | SEQ |
|---|---|---|---|
| Organism | Protein name | Accession # | ID NO. |
| Giardia lamblia | NADH oxidase lateral | XP_001707974.1 | 266 |
| | transfer candidate | | |
| Giardia lamblia | NADH oxidase lateral | EFO61859.1 | 267 |
| | transfer candidate | | |
| Giardia intestinalis | NADH oxidase lateral | EET00402.1 | 268 |
| | transfer candidate | | |

TABLE 2
Exemplary water-forming NADH oxidases
that utilize a cofactor other than FAD

| | Protein name in the | GenBank | SEQ |
|---|---|---|---|
| Organism | database | Accession # | ID NO. |
| Trichomonas | Pyridine nucleotide- | XP_001317833.1 | 269 |
| vaginalis | disulphide | | |
| | oxidoreductase family | | |
| | protein | | |
| Trichomonas | Pyridine nucleotide- | XP_001315422.1 | 270 |
| vaginalis | disulphide | | |
| | oxidoreductase family | | |
| | protein | | |
| Trichomonas | Pyridine nucleotide- | XP_001322980.1 | 271 |
| vaginalis | disulphide | | |
| | oxidoreductase family | | |
| | protein | | |
| Synechocystis | Diflavin flavoprotein A 1 | WP_010873710.1 | 272 |
| sp. | | | |
| Synechocystis | DeoR family | WP_010871360.1 | 273 |
| sp. | transcriptional regulator | | |

[0099] Examples of water-forming NADH oxidases from the organisms described above that can be used in the compositions and methods of the invention include those that have at least 85% sequence identity (e.g., 85%, 90%, 95%, 97%, 99%, or 100% sequence identity) to the sequence of any one of SEQ ID NOs: 1-273 and biologically active fragments thereof.

[0100] NADPH-specific water-forming NADPH oxidases can be isolated, for instance, from S. mutans (SEQ ID NO: 330). NADPH-specific water-forming NADPH oxidases may also be rationally designed, for instance, using procedures described herein. A representative rationally-designed NADPH-specific water-forming NADPH oxidase is TPNOX (SEQ ID NO: 329), the design of which is described in Example 11 below.

[0101] Water-Forming NADH Oxidase Derived from Lactobacillus brevis

[0102] The water-forming NADH oxidases, as well as biologically active fragments thereof that maintain enzymatic activity, for use in the compositions and methods of the invention exhibit catalytic properties that render these enzymes well-suited for therapeutic application in patients suffering from diseases associated with deficiencies in the mitochondrial respiratory chain. One particular enzyme for use in the compositions and methods of the invention that exhibits exemplary biochemical properties is the water-forming NADH oxidase that is endogenous to Lactobacillus brevis. This oxidase (hereinafter “LbNOX”) is of particular interest given its reactivity with NADH and molecular oxygen at biologically relevant concentrations of these substrates, as well as the ability of this enzyme to restrict hydrogen peroxide production to a minimal amount. LbNOX exhibits an apparent K_{M} for NADH of 69 μM and an apparent K_{M} for O₂ of below 2 μM (˜0.17% O₂) as estimated from enzyme-monitored turnover experiments (FIG. 7), which is more than 10-fold lower than the concentration of oxygen in human venous blood. Moreover, LbNOX produces less than 1-2% by mole of H₂O₂ relative to H₂O production during its catalytic cycle (FIG. 6). The high affinity of LbNOX for molecular oxygen, coupled with the surprisingly low production of H₂O₂, makes this enzyme well-suited for potential therapeutic applications in mammalian tissues.

[0103] In view of these beneficial properties, water-forming NADH oxidases can be administered to a patient to compensate for a defective respiratory chain in mammalian cells, particularly in human cells. The inability of a defective respiratory chain to produce ATP has long been considered an underlying etiology for diseases that have been correlated with mitochondrial dysfunction. Yet, many problematic phenotypes associated with these diseases, such as stalled glucose metabolism and nucleotide biosynthesis, can be overcome by introducing an exogenous water-forming NADH oxidase, such as one or more of those described herein, to a mammalian cell harboring a defective respiratory chain. The pathophysiology of many mitochondrial diseases can in fact be attributed to the inability of the cell to regenerate NAD⁺, a problem that can be readily addressed by administration of water-forming NADH oxidases according to the methods of the invention.

[0104] Methods of Treating Mammalian Diseases and Conditions

[0105] Mitochondrial disorders represent one of the most common and challenging classes of inborn errors of metabolism. Symptoms arise in infancy or in adulthood and typically impact multiple organ systems. Manifestations may include lactic acidosis, seizures, stroke-like episodes, gray or white matter disease, neurodegeneration, autonomic dysfunction, cardiac conduction defects, cardiomyopathy, pancreatic exocrine or endocrine dysfunction, skeletal muscle myopathy, peripheral neuropathy, blindness, gastrointestinal dysmotility, deafness, and liver and kidney failure. Over 150 nuclear genome encoded disease genes have been identified, and over 100 mtDNA mutations in mitochondrial DNA (mtDNA) have been identified. All of these disorders are characterized by a biochemical defect within the mitochondrial respiratory chain or in the ATP synthase (complex V). However, these disorders continue to pose great clinical challenges: they are difficult to diagnose due to their phenotypic and genetic heterogeneity, and no proven therapies currently exist. It is also less likely that the pharmaceutical industry will pursue these disorders since they represent a large collection of individually rare genetic syndromes, each affecting only a few hundred patients. This invention provides a new therapeutic paradigm by targeting a unifying common cause in all of these disorders: a blockade in the respiratory chain.

[0106] Water-forming NADH or NADPH oxidases (for instance, a water-forming NADH oxidase having the amino acid sequence of any one of SEQ ID NOs: 1-273 and variants thereof described herein, such as a water-forming NADH oxidase having the amino acid sequence of any one of SEQ ID NOs: 1-5, or a water-forming NADPH oxidase having the amino acid sequence of SEQ ID NO: 329 or 330 and variants thereof described herein), as well as biologically active fragments thereof that maintain enzymatic activity, can be administered to a patient (e.g., a human patient) suffering from a disease associated with an elevated NADH to NAD⁺ ratio or an elevated NADPH to NADP⁺ ratio. In order to assess whether a patient is in need of such treatment, a physician may analyze the ratio of NADH to NAD⁺ or NADPH to NADP⁺ within one or more cells of a patient. For instance, one may analyze the ratio of NADH to NAD⁺ or NADPH to NADP⁺ in the cytoplasm or mitochondria of one or more cells of a patient (e.g., according to the methods described herein or known in the field). In these instances, an elevated ratio of NADH:NAD⁺ or NADPH:NADP⁺ relative to that of a healthy human indicates a patient may be suffering from reductive stress and can be treated by administration of a water-forming NADH or NADPH oxidase or a biologically active fragment thereof. In other cases, a physician may analyze the ratio of NAD⁺ to NADH or NADP⁺ to NADPH in one or more cells (e.g., in the cytoplasm or mitochondria of these cells) of a patient. In these instances, a reduced ratio of NAD⁺:NADH or NADP⁺:NADPH relative to that of a healthy human indicates a patient may be suffering from reductive stress and can be treated by administration of a water-forming NADH or NADPH oxidase or a biologically active fragment thereof.

[0107] Examples of diseases that can be treated by administration of a water-forming NADH or NADPH oxidase or biologically active fragment thereof, such as those described herein, include any disorder that is associated with a defect in a component of the mitochondrial respiratory chain, such as complexes I through IV of the respiratory chain. Examples of such diseases include, without limitation, mitochondrial myopathy, Wolff-Parkinsons-White syndrome, neuropathy, ataxia, Friedreich's ataxia, retinitis pigmentosa, and ptosis (NARP), myoneurogenic gastrointestinal encephalopathy (MNGIE), myoclonic epilepsy with ragged red fibers (MERRF), mitochondrial encephalomyopathy, lactic acidosis, and stroke-like symptoms (MELAS), mitochondrial DNA depletion, chronic progressive external ophthalmoplegia, Kearns-Sayre syndrome, Leber hereditary optic neuropathy, mitochondrial encephalomyopathy, myoclonic epilepsy, myopathy, and sensory ataxia (MEMSA), myoclonic epilepsy, mitochondrial recessive ataxia syndrome, sensory ataxia neuropathy, dysarthria, ophthalmoplegia, and spinocerebellar ataxia, sarcopenia, and skeletal muscle atrophy. Water-forming NADH or NADPH oxidases, such as those described herein, can be administered to patients suffering from these disorders in order to stimulate NAD⁺ and/or NADP⁺ regeneration, which has stalled in these patients due to a malfunction of the respiratory chain.

[0108] Water-forming NADH or NADPH oxidases, such as those described herein, are also useful in the treatment of neurodegenerative diseases, such as Parkinson's disease. This disease has been correlated with the onset of oxidative stress due to elevated NADH levels caused by a deficiency in complex I and complex III activity, often due to mutations in one or more genes that encode one or more proteins of these complexes (Konstanze, et al., Biochim. Biophys. Acta Mol. Bas. Dis., 1802:29-44, 2010), due to environmental toxins that cause Parkinsons disease, or by other mechanisms. Water-forming NADH or NADPH oxidases and biologically active fragments thereof that maintain enzymatic activity can therefore be administered to a patient to treat this disorder, as these enzymes can enable NADH to bypass the respiratory chain altogether to get oxidized, regardless of the constituent proteins that are defective in a given patient.

[0109] In light of the ability of these enzymes to modulate gluconeogenesis and provide NAD⁺ that is necessary for glucose catabolism, water-forming NADH or NADPH oxidases and biologically active fragments thereof that maintain enzymatic activity, such as those described herein, can also be administered to patients suffering from a glucose metabolism disorder. Patients that may be amenable to such treatment include those suffering from type I or type II diabetes, as well as obesity. Water-forming NADH or NADPH oxidases can be administered to such patients in order to restore glucose uptake and glycolysis, a process that is contingent upon a sufficient cytosolic supply of NAD⁺. In addition, water-forming NADH or NADPH oxidases catalyze an exergonic redox reaction in which heat is released due to the reduction of molecular oxygen (the NADH oxidation and oxygen reduction process is characterized by an electromotive force of approximately 1.14 V per mole of NADH under standard, physiological conditions). The burning of calories that occurs during this process is another means by which these enzymes may be used to treat such disorders as obesity and diabetes.

[0110] Aging is another condition that can be treated using water-forming NADH or NADPH oxidases and biologically active fragments thereof that maintain enzymatic activity. At the cellular level, aging is a progressive decline in the ability of a cell to respond to stress, resulting in loss of vital metabolic activity and ultimately cell death. Reductive stress imposed by an elevated NADH to NAD⁺ ratio can lead to the production of reactive oxygen species (ROS), such as superoxide (O₂⁻) or hydrogen peroxide. These molecules are highly reactive and can induce damage in essential biomolecules, including proteins and DNA. Specific examples of ROS-induced chemical harm include the oxidation of amino acids in proteins, the cleavage of nucleic acids, and the oxidation of lipids. The totality of this damage results in loss of critical cellular functions and is associated with the aging process. The administration of water-forming NADH or NADPH oxidases according to the invention can help to mitigate the aging process (e.g., slow this process or lessen the damaging effects caused by reductive stress) by diminishing the NADH to NAD⁺ ratio so as to prevent the formation of reactive oxygen species.

[0111] ROS-induced oxidative damage at the molecular level can produce a variety of symptoms that are associated with the aging process. These symptoms vary with the precise location of oxidative stress within the body. For instance, age-associated oxidative stress has been correlated with certain cardiac conditions, including a thickening of the walls of the heart, a decline in efficiency of cardiomyocyte activity, a reduction in flexibility of the aorta, and in certain cases one may experience a gradual onset of atherosclerosis. Additionally, oxidative stress that accompanies aging induces digestive difficulties, including a reduction in the secretion of digestive enzymes by the stomach, liver, pancreas, and small intestine, as well as a decline in the rate at which food progresses through the gastrointestinal tract. Aging has also been correlated with a weakening of cartilage, muscle, and bone. In certain cases, one may experience a stiffening of the retina, a decline in clarity of the ocular lenses, and a thickening of the eardrums. The growth of hair and nails has been shown to slow as aging progresses, and skin progressively loses thickness and elasticity. Additional indications of aging include, for example, increased susceptibility to infection, greater risk of heat stroke or hypothermia, a reduction in height as bone mass declines, stooped posture, slowed and limited movement, lethargy, urinary incontinence, slowing of thought and memory recall, reduced physical coordination, diminished visual acuity, decline in peripheral vision, hearing loss, graying or whitening of the hair, weight loss, and stooped posture. Water-forming NADH or NADPH oxidases and biologically active fragments thereof that maintain enzymatic activity, such as those described herein, are capable of depleting intracellular NADH and NADPH, thereby inducing a shift in redox equilibria away from the formation of peroxides and other reactive oxygen species. Since the accumulation of these molecules and the chemical degradation they effect has been correlated with the aging process, water-forming NADH or NADPH oxidases can be administered according to the methods of the invention to a patient in order to treat one or more symptoms associated with aging, such as those listed above.

[0112] A water-forming NADH or NADPH oxidase (for instance, a water-forming NADH oxidase having the amino acid sequence of any one of SEQ ID NOs: 1-273 and variants thereof, such as a water-forming NADH oxidase having the amino acid sequence of any one of SEQ ID NOs: 1-5, or a water-forming NADPH oxidase having the amino acid sequence of SEQ ID NO: 329 or 330 and variants thereof) or a biologically active fragment thereof that maintains enzymatic activity can also be administered to a patient (e.g., a human patient) suffering from cancer in order to improve the condition of such patients. Oxidative stress induced by an elevated NADH to NAD⁺ ratio has been shown to activate a variety of transcription factors, including NF-κB, AP-1, p53, HIF-1α, PPAR-γ, β-catenin/Wnt, and Nrf2. The aberrant activation of these transcription factors can engender the expression of over 500 different genes, including those for growth factors, inflammatory cytokines, chemokines, cell cycle regulatory molecules, and anti-inflammatory molecules (Reuter, et al., Free Radic. Biol. Med., 49:1603-1616, 2010). Moreover, elevated levels of ROS lead to mutations in important genes that control cell cycle progression, and these mutations have been correlated with the onset of a variety of cancers (Muller, et al., Eur. J. Biochem., 244:45-52, 1997). By administering a water-forming NADH or NADPH oxidase, such as those described herein, to a patient suffering from cancer or a disease associated with aberrant cell cycle regulation, the intracellular level of NADH relative to NAD⁺ can be lowered, thus restoring redox balance and preventing ROS-induced DNA damage. Examples of cancers that can be treated with a water-forming NADH or NADPH oxidase include, without limitation, breast cancer, paraganglioma, phaeochromocytoma, leiomyoma, leiomyosarcoma, and renal cell carcinoma.

[0113] Water-forming NADH or NADPH oxidases (for instance, a water-forming NADH oxidase having the amino acid sequence of any one of SEQ ID NOs: 1-273 and variants thereof, such as a water-forming NADH oxidase having the amino acid sequence of any one of SEQ ID NOs: 1-5, or a water-forming NADPH oxidase having the amino acid sequence of SEQ ID NO: 329 or 330 and variants thereof) and biologically active fragments thereof that maintain enzymatic activity may also provide relief from the symptoms of a mitochondrial disorder. Patients presenting with one or more of such diseases often exhibit any of a variety of symptoms due to dysfunctional respiratory chain activity in one or more organs. For instance, deficient mitochondrial function in the brain can cause dementia, neuro-psychiatric disturbances, migraines, seizures, strokes, atypical cerebral palsy, mental retardation, autistic features, and developmental delays. Insufficient neuronal respiratory chain activity has been correlated with weakness, absent reflexes, fainting, neuropathic pain, and internal temperature instability. Muscular respiratory chain deficiencies are often associated with cramping, gastrointestinal pain, dysmotility, irritable bowel syndrome, hypotonia, muscle pain, gastroesophageal reflux, diarrhea, constipation, and intestinal pseudo-obstruction (inability of the intestine to move food, stool, or air through the gastrointestinal tract). In the kidneys, lack of mitochondrial respiratory chain activity can cause renal tubular acidosis. Insufficient cardiac mitochondrial activity may lead to cardiac conduction defects and cardiomyopathy. Liver mitochondrial defects can cause hypoglycemia and potential liver failure. Dysfunctional respiratory chain activity in the eyes and ears can lead to visual loss, blindness, ptosis, ophthalmoplegia, optic atrophy, hearing loss, deafness, acquired strabismus, and retinitis pigmentosa. Additional symptoms may include exocrine pancreatic failure due to mitochondrial dysfunction in the pancreas, as well as fatigue, failure to gain weight, vomiting, and respiratory sickness as a result of systemic deficiencies in mitochondrial activity. In this way, water-forming NADH or NADPH oxidases, when administered according to methods of the invention, can provide a two-fold paradigm for treating mitochondrial disease. These enzymes can be administered to patients on a long-term basis (e.g., over the course of days, weeks, months, years, etc.) to promote continuous redox balance and thus ameliorate a mitochondrial disorder over the course of a patient's lifetime. In addition, water-forming NADH or NADPH oxidases represent a novel short-term therapy that can be administered to a patient to alleviate one or more symptoms of mitochondrial dysfunction, such as those described above.

[0114] Treatment of the diseases, conditions, and symptoms of mitochondrial disorders (e.g., as described herein) by administration of water-forming NADH or NADPH oxidases and biologically active fragments thereof that maintain enzymatic activity, such as those described herein, can improve the condition of a patient over the course of such treatment. The condition of a patient that receives treatment by administration of water-forming NADH or NADPH oxidases can be monitored by any of a variety of different strategies. For example, a patient undergoing treatment with these therapeutic enzymes can be monitored by routine observation by a physician for a change in the frequency or severity of one or more symptoms associated with a mitochondrial disease (e.g., one of the symptoms described above). Optionally, cells can be extracted from the patient in order to conduct a biochemical analysis of the relative levels of metabolites and cofactors within the cells or within specific organelles of these cells. For instance, cells of a patient can be extracted and the intracellular concentrations of NAD⁺ and NADH or NADP⁺ and NADPH can be determined in order to analyze the response of the patient to treatment with water-forming NADH or NADPH oxidases. It may optionally be desirable for a physician to monitor the progression of a disease or condition in a patient by analyzing a bodily fluid sample. For instance, a physician may withdraw blood from a patient undergoing therapy in order to determine the concentration of one or more proteins, metabolites, or nutrients in the sample to evaluate the response of the patient to treatment with water-forming NADH or NADPH oxidases. In certain cases, it may be desirable to monitor the dissolved oxygen content within a blood sample in order to determine the effectiveness of the therapy, as water-forming NADH or NADPH oxidases are capable of increasing the rate of oxygen consumption in mammalian cells and may therefore modulate the oxygenation state of red blood cells. Optionally, a physician may monitor the progression of a disease or condition in a patient undergoing water-forming NADH or NADPH oxidase therapy by analyzing a urine sample, e.g., by determining the concentration of dissolved metabolites or nutrients, such as lactate. This may be desirable so as to monitor the progression of a glucose metabolism disorder, such as diabetes, since the excretion of glucose into the urine due to the inability of the kidneys to retain glucose is an indication of this disease. Examples of other bodily fluids that may be analyzed so as to monitor a patient undergoing treatment by administration of the compositions of the invention, e.g., water-forming NADH or NADPH oxidases, polynucleotides encoding water-forming NADH or NADPH oxidases, vectors containing these polynucleotides, a mammalian cell expressing a water-forming NADH or NADPH oxidase, etc., include aqueous humor, cerebrospinal fluid, endolymph, perilymph, mucus, pericardial fluid, peritoneal fluid, saliva, sebumen, semen, sweat, and tears, among others.

[0115] In order to treat the diseases or conditions described herein, one may administer a water-forming NADH or NADPH oxidase or a biologically active fragment thereof that maintains enzymatic activity, such as those described herein, to a patient in need thereof. This can be done by, for example, administering a human cell that has been engineered so as to express a water-forming NADH or NADPH oxidase to a patient presenting with one or more of these disorders. In this way, for instance, the tissue system or organ that is adversely affected by a dysfunctional respiratory chain can regenerate NAD⁺ and restore proper redox balance. Human cells can be modified in order to express water-forming NADH or NADPH oxidases, for example, by any of the methods or techniques described herein, in order to provide a patient with a continuous supply of cells containing these enzymes. For instance, a human cell that has been modified such that a polynucleotide encoding a water-forming NADH or NADPH oxidase has been covalently inserted into the nuclear DNA of the cell can be administered to a patient in order to treat a mitochondrial disease. Not only can these cells achieve short-term relief from the disorder, for instance, by regenerating NAD⁺ or NADP⁺ at sites of reductive stress, this treatment regimen may also provide a longer-term supply of water-forming NADH or NADPH oxidases, as the administered cell can proliferate in vivo, giving rise to daughter cells that contain these enzymes. This proliferation can continue so as to produce a population of cells that express water-forming NADH or NADPH oxidases and may therefore provide continuous relief from the effects of a dysfunctional respiratory chain.

[0116] In addition to this treatment paradigm, water-forming NADH or NADPH oxidases and biologically active fragments thereof that maintain enzymatic activity can be administered to a patient by a variety of other mechanisms. For instance, a polynucleotide encoding the enzyme can be administered to a patient. A polynucleotide encoding the enzyme can be administered to a patient, e.g., in the form of a vector. If desired, the vector may be one that integrates the polynucleotide into the genome of the patient. A water-forming NADH or NADPH oxidase can alternatively be administered as a therapeutic protein directly to a patient, and a variety of strategies have been developed for administration of whole proteins that can be used to facilitate delivery of these enzymes to the appropriate cellular target. The sections that follow describe in further detail the methods by which water-forming NADH or NADPH oxidases may be administered to a patient, particularly to a mammalian patient, and most preferably to a human patient, suffering from a disease associated with an elevated NADH to NAD⁺ ratio and/or an elevated NADPH to NADP⁺ ratio.

[0117] Expression of Water-Forming NADH or NADPH Oxidases in Mammalian Cells

[0118] The water-forming NADH or NADPH oxidases of the invention can be derived from microbial organisms that have evolved single enzymes that perform the NADH or NADPH oxidation and concomitant reduction of molecular oxygen to water that is generally performed by the mitochondrial respiratory chain in mammalian cells. Such single-protein, water-forming NADH or NADPH oxidases are not naturally occurring in the mammalian proteome. Because of their singular nature, these enzymes represent an attractive paradigm for targeting mammalian diseases, particularly those that are associated with elevated NADH/NAD⁺ ratios. In order to utilize these enzymes for therapeutic application in the restoration of intracellular NAD⁺, these enzymes can be directed to the interior of the cell, and in particular instances, to particular organelles. A wide array of methods has been established for the delivery of such proteins to mammalian cells and for the stable expression of genes encoding such proteins in mammalian cells.

[0119] Polynucleotides Encoding Water-Forming NADH or NADPH Oxidases

[0120] One platform that can be used to achieve therapeutically effective intracellular concentrations of water-forming NADH or NADPH oxidases (for instance, a water-forming NADH oxidase having the amino acid sequence of any one of SEQ ID NOs: 1-273 and variants thereof, such as a water-forming NADH oxidase having the amino acid sequence of any one of SEQ ID NOs: 1-5, or a water-forming NADPH oxidase having the amino acid sequence of SEQ ID NO: 329 or 330 and variants thereof) in mammalian cells is via the stable expression of genes encoding these enzymes (e.g., by integration into the nuclear or mitochondrial genome of a mammalian cell). These genes are polynucleotides that encode the primary amino acid sequence of the corresponding protein. In order to introduce such exogenous genes into a mammalian cell, these genes can be incorporated into a vector. Vectors can be introduced into a cell by a variety of methods, including transformation, transfection, direct uptake, projectile bombardment, and by encapsulation of the vector in a liposomes. Examples of suitable methods of transfecting or transforming cells include calcium phosphate precipitation, electroporation, microinjection, infection, lipofection and direct uptake. Such methods are described in more detail, for example, in Sambrook et al., Molecular Cloning: A Laboratory Manual, Second Edition, Cold Spring Harbor University Press, New York (1989) and Ausubel, et al., Current Protocols in Molecular Biology, John Wiley & Sons, New York (1998), the teachings of which are incorporated herein by reference.

[0121] Water-forming NADH or NADPH oxidases (for instance, a water-forming NADH oxidase having the amino acid sequence of any one of SEQ ID NOs: 1-273 and variants thereof, such as a water-forming NADH oxidase having the amino acid sequence of any one of SEQ ID NOs: 1-5, or a water-forming NADPH oxidase having the amino acid sequence of SEQ ID NO: 329 or 330 and variants thereof) can also be introduced into a mammalian cell by targeting a vector containing a gene encoding such an enzyme to cell membrane phospholipids. For example, vectors can be targeted to the phospholipids on the extracellular surface of the cell membrane by linking the vector molecule to a VSV-G protein, a viral protein with affinity for all cell membrane phospholipids. Such a construct can be produced using methods well known to those of skill in the field.

[0122] Recognition and binding of the polynucleotide encoding a water-forming NADH or NADPH oxidase by mammalian RNA polymerase is important for gene expression. As such, one may include sequence elements within the polynucleotide that exhibit a high affinity for transcription factors that recruit RNA polymerase and promote the assembly of the transcription complex at the transcription initiation site. Such sequence elements include, e.g., a mammalian promoter, the sequence of which can be recognized and bound by specific transcription initiation factors and ultimately RNA polymerase. Examples of mammalian promoters have been described in Smith, et al., Mol. Sys. Biol., 3:73, online publication, the teachings of which are incorporated by reference herein.

[0123] Polynucleotides of this invention also include those that encode a water-forming NADH or NADPH oxidase (for instance, a water-forming NADH oxidase having the amino acid sequence of any one of SEQ ID NOs: 1-273 and variants thereof, such as a water-forming NADH oxidase having the amino acid sequence of any one of SEQ ID NOs: 1-5, or a water-forming NADPH oxidase having the amino acid sequence of SEQ ID NO: 329 or 330 and variants thereof) downstream of a mammalian promoter. Promoters that are useful for the expression of water-forming NADH or NADPH oxidases in mammalian cells include, e.g., albumin promoter, apolipoprotein promoter, cycloexegnase-2 promoter, cyclooxygenase-5B promoter, acyl-CoA oxidase promoter, glycerol-3-phosphate dehydrogenase promoter, xanthine dehydrogenase promoter, lysyl oxidase-like 3 promoter, intercellular adhesion molecule 5 promoter, succinate dehydrogenase complex promoters (e.g., subunit A flavoprotein), molybdenum cofactor synthesis 1 promoter, D-aspartate oxidase promoter, NADPH oxidase 3 promoter, elongator acetyltransferase complex subunit 3 promoter, sarcosine dehydrogenase promoter, polyamine oxidase promoter, ferritin heavy polypeptide 1 promoter, dual oxidase maturation factor 1 promoter, methallothionein promoter, β-actin promoter, human hemoglobin promoter, and human muscle creatine promoter. Alternatively, promoters derived from viral genomes can also be used for the stable expression of these enzymes in mammalian cells. Examples of functional viral promoters that can be used to promote mammalian expression of these enzymes include adenovirus late promoter, vaccinia virus 7.5K promoter, SV40 promoter, cytomegalovirus promoter, tk promoter of HSV, mouse mammary tumor virus (MMTV) promoter, LTR promoter of HIV, promoter of moloney virus, Epstein barr virus (EBV), Rous sarcoma virus (RSV), and the cytomegalovirus (CMV) promoter.

[0124] Once a polynucleotide encoding a water-forming NADH or NADPH oxidase has been incorporated into the nuclear DNA of a mammalian cell, the transcription of this polynucleotide can be induced by methods known in the art. For example expression can be induced by exposing the mammalian cell to an external chemical reagent, such as an agent that modulates the binding of a transcription factor and/or RNA polymerase to the mammalian promoter and thus regulate gene expression. The chemical reagent can serve to facilitate the binding of RNA polymerase and/or transcription factors to the mammalian promoter, e.g., by removing a repressor protein that has bound the promoter. Alternatively, the chemical reagent can serve to enhance the affinity of the mammalian promoter for RNA polymerase and/or transcription factors such that the rate of transcription of the gene located downstream of the promoter is increased in the presence of the chemical reagent. Examples of chemical reagents that potentiate polynucleotide transcription by the above mechanisms include tetracycline and doxycycline. These reagents are commercially available (Life Technologies, Carlsbad, Calif.) and can be administered to a mammalian cell in order to promote gene expression according to established protocols.

[0125] Other DNA sequence elements that may be included in polynucleotides for use in the compositions and methods of the invention include enhancer sequences. Enhancers represent another class of regulatory elements that induce a conformational change in the polynucleotide comprising the gene of interest such that the DNA adopts a three-dimensional orientation that is favorable for binding of transcription factors and RNA polymerase at the transcription initiation site. Thus, polynucleotides for use in the compositions and methods of the invention include those that encode a water-forming NADH or NADPH oxidase and additionally include a mammalian enhancer sequence. Many enhancer sequences are now known from mammalian genes, and examples include enhancers from the genes that encode mammalian globin, elastase, albumin, α-fetoprotein, and insulin. Enhancers for use in the compositions and methods of the invention also include those that are derived from the genetic material of a virus capable of infecting a eukaryotic cell. Examples include the SV40 enhancer on the late side of the replication origin (bp 100-270), the cytomegalovirus early promoter enhancer, the polyoma enhancer on the late side of the replication origin, and adenovirus enhancers. Additional enhancer sequences that induce activation of eukaryotic gene transcription are disclosed in Yaniv, et al. (Nature 297:17-18, 1982). An enhancer may be spliced into a vector containing a polynucleotide encoding a water-forming NADH oxidase, for example, at a position 5′ or 3′ to this gene. In a preferred orientation, the enhancer is positioned at the 5′ side of the promoter, which in turn is located 5′ relative to the polynucleotide encoding the water-forming NADH or NADPH oxidase.

[0126] In addition to providing the proper transcription activating elements, another technique that can be used to ensure stable expression of exogenous water-forming NADH or NADPH oxidases (for instance, a water-forming NADH oxidase having the amino acid sequence of any one of SEQ ID NOs: 1-273 and variants thereof, such as a water-forming NADH oxidase having the amino acid sequence of any one of SEQ ID NOs: 1-5, or a water-forming NADPH oxidase having the amino acid sequence of SEQ ID NO: 329 or 330 and variants thereof) in a mammalian cell is to optimize the polynucleotide comprising the gene for expression by the mammalian transcription and translation complexes. As a result of the multiplicity of codons that encode a single amino acid, it is frequently necessary to prepare polynucleotides that comprise codons that are preferentially recognized by the mammalian ribosome in order to ensure robust translation rates. For instance, the amino acid isoleucine is preferentially encoded by the codon ATT in certain bacterial cells, such as those of L. brevis. In human cells, however, isoleucine is preferentially encoded by the codon ATC. Cells of S. pneumoniae preferentially recognize the codon CAT to direct the incorporation of histidine into an elongating polypeptide chain, while human cells preferentially utilize the codon CAC to signal incorporation of the same amino acid. In view of the fact that water-forming NADH or NADPH oxidases are derived from lower-order organisms, such as L. brevis and S. pneumoniae, these enzymes may be inefficiently translated according to their native DNA sequence. The genes encoding these enzymes can be optimized for expression in human cells in order to ensure high rates of protein biosynthesis.

[0127] Vectors for the Expression of Water-Forming NADH or NADPH Oxidases

[0128] In addition to achieving high rates of transcription and translation, stable expression of an exogenous gene in a mammalian cell can be achieved by integration of the polynucleotide comprising the gene into the nuclear genome of the mammalian cell. A variety of vectors for the delivery and integration of polynucleotides encoding exogenous proteins into the nuclear DNA of a mammalian cell have been developed. Examples of expression vectors are disclosed in, e.g., WO 1994/11026 and are incorporated herein by reference. Expression vectors for use in the compositions and methods of the invention contain a polynucleotide sequence that encodes a water-forming NADH or NADPH oxidase (for instance, a water-forming NADH oxidase having the amino acid sequence of any one of SEQ ID NOs: 1-273 and variants thereof, such as a water-forming NADH oxidase having the amino acid sequence of any one of SEQ ID NOs: 1-5, or a water-forming NADPH oxidase having the amino acid sequence of SEQ ID NO: 329 or 330 and variants thereof), as well as, e.g., additional sequence elements used for the expression of these enzymes and/or the integration of these polynucleotide sequences into the genome of a mammalian cell. Certain vectors that can be used for the expression of water-forming NADH or NADPH oxidases include plasmids that contain regulatory sequences, such as promoter and enhancer regions, which direct gene transcription. Other useful vectors for expression of water-forming NADH or NADPH oxidases contain polynucleotide sequences that enhance the rate of translation of these genes or improve the stability or nuclear export of the mRNA that results from gene transcription. These sequence elements include, e.g., 5′ and 3′ untranslated regions, an internal ribosomal entry site (IRES), and polyadenylation signal site in order to direct efficient transcription of the gene carried on the expression vector. The expression vectors of the invention may also contain a polynucleotide encoding a marker for selection of cells that contain such a vector. Examples of a suitable marker include genes that encode resistance to antibiotics, such as ampicillin, chloramphenicol, kanamycin, or nourseothricin.

[0129] Viral genomes provide a rich source of vectors that can be used for the efficient delivery of exogenous genes into a mammalian cell. Viral genomes are particularly useful vectors for gene delivery because the polynucleotides contained within such genomes are typically incorporated into the nuclear genome of a mammalian cell by generalized or specialized transduction. These processes occur as part of the natural viral replication cycle, and do not require added proteins or reagents in order to induce gene integration. Examples of viral vectors include a retrovirus, adenovirus (e.g., Ad5, Ad26, Ad34, Ad35, and Ad48), parvovirus (e.g., adeno-associated viruses), coronavirus, negative strand RNA viruses such as orthomyxovirus (e.g., influenza virus), rhabdovirus (e.g., rabies and vesicular stomatitis virus), paramyxovirus (e.g. measles and Sendai), positive strand RNA viruses, such as picornavirus and alphavirus, and double stranded DNA viruses including adenovirus, herpesvirus (e.g., Herpes Simplex virus types 1 and 2, Epstein-Barr virus, cytomegalovirus), and poxvirus (e.g., vaccinia, modified vaccinia Ankara (MVA), fowlpox and canarypox). Other viruses include Norwalk virus, togavirus, flavivirus, reoviruses, papovavirus, hepadnavirus, and hepatitis virus, for example. Examples of retroviruses include: avian leukosis-sarcoma, mammalian C-type, B-type viruses, D-type viruses, HTLV-BLV group, lentivirus, spumavirus (Coffin, J. M., Retroviridae: The viruses and their replication, In Fundamental Virology, Third Edition, B. N. Fields, et al., Eds., Lippincott-Raven Publishers, Philadelphia, 1996). Other examples include murine leukemia viruses, murine sarcoma viruses, mouse mammary tumor virus, bovine leukemia virus, feline leukemia virus, feline sarcoma virus, avian leukemia virus, human T-cell leukemia virus, baboon endogenous virus, Gibbon ape leukemia virus, Mason Pfizer monkey virus, simian immunodeficiency virus, simian sarcoma virus, Rous sarcoma virus and lentiviruses. Other examples of vectors are described, for example, in McVey et al. (U.S. Pat. No. 5,801,030), the teachings of which are incorporated herein by reference.

[0130] Incorporation of Polynucleotides by Gene Editing Techniques

[0131] In addition to viral vectors, a variety of additional tools have been developed for the incorporation of exogenous genes into mammalian cells. One such method that can be used for incorporating polynucleotides encoding water-forming NADH or NADPH oxidases (for instance, a water-forming NADH oxidase having the amino acid sequence of any one of SEQ ID NOs: 1-273, such as a water-forming NADH oxidase having the amino acid sequence of any one of SEQ ID NOs: 1-5, or a water-forming NADPH oxidase having the amino acid sequence of SEQ ID NO: 329 or 330) into mammalian cells includes transposons. Transposons are polynucleotides that encode transposase enzymes and contain a polynucleotide sequence or gene of interest flanked by excision sites at the 5′ and 3′ positions. Once a transposon has been delivered into a cell, expression of the transposase gene commences and results in active enzymes that cleave the gene of interest from the transposon. This activity is mediated by the site-specific recognition of transposon excision sites by the transposase. In certain cases, these excision sites may be terminal repeats or inverted terminal repeats. Once excised from the transposon, the gene of interest can be integrated into the genome of a mammalian cell by transposase-catalyzed cleavage of similar excision sites that exist within nuclear genome of the cell. This allows the gene of interest to be inserted into the cleaved nuclear DNA at the excision sites, and subsequent ligation of the phosphodiester bonds that join the gene of interest to the DNA of the mammalian cell genome completes the incorporation process. In certain cases, the transposon may be a retrotransposon, such that the gene encoding the water-forming NADH or NADPH oxidase is first transcribed to an RNA product and then reverse-transcribed to DNA before incorporation in the mammalian cell genome. Exemplary transposon systems include the piggybac transposon (described in detail in WO 2010/085699) and the sleeping beauty transposon (described in detail in US20050112764), the teachings of both of which are incorporated herein by reference.

[0132] Another useful tool for the integration of water-forming NADH or NADPH oxidases (for instance, a water-forming NADH oxidase having the amino acid sequence of any one of SEQ ID NOs: 1-273, such as a water-forming NADH oxidase having the amino acid sequence of any one of SEQ ID NOs: 1-5, or a water-forming NADPH oxidase having the amino acid sequence of SEQ ID NO: 329 or 330) into the genome of a mammalian cell is the clustered regularly interspaced short palindromic repeats (CRISPR)/Cas system, which is a system that originally evolved as an adaptive defense mechanism in bacteria and archaea against infection by viruses. The CRISPR/Cas system consists of palindromic repeat sequences within plasmid DNA and an associated Cas9 nuclease. This ensemble of DNA and protein directs site specific DNA cleavage of a target sequence by first incorporating foreign DNA into CRISPR loci. Polynucleotides containing these foreign sequences and the repeat-spacer elements of the CRISPR locus are in turn transcribed in a host cell to create a guide RNA, which can subsequently anneal to a target sequence and localize the Cas9 nuclease to this site. In this manner, highly site-specific cas9-mediated DNA cleavage can be engendered in a foreign polynucleotide because the interaction that brings cas9 within close proximity of the target DNA molecule is governed by RNA:DNA hybridization. As a result, one can theoretically design a CRISPR/Cas system to cleave any target DNA molecule of interest. This technique has been exploited in order to edit eukaryotic genomes (Hwang, et al., Nat. Biotech., 31:227-229, 2013) and can be used as an efficient means of site-specifically editing mammalian genomes in order to cleave DNA prior to the incorporation of a gene encoding a water-forming NADH oxidase. The use of CRISPR/Cas to modulate gene expression has been described in U.S. Pat. No. 8,697,359, which is incorporated herein by reference. Alternative methods for site-specifically cleaving genomic DNA prior to the incorporation of a gene of interest include the use of zinc finger nucleases and transcription activator-like effector nucleases (TALENs). Unlike the CRISPR/Cas system, these enzymes do not contain a guiding polynucleotide to localize to a specific target sequence. Target specificity is instead controlled by DNA binding domains within these enzymes. Zinc finger nucleases and TALENs for use in genome editing applications are described in Urnov, et al., Nat. Rev. Genet., 11:636-646, 2010; and in Joung, et al., Nat. Rev. Mol. Cell. Bio., 14:49-55, 2013, the teachings of both of which are incorporated herein by reference. Additional genome editing techniques that can be used to incorporate polynucleotides encoding water-forming NADH or NADPH oxidases into the genome of a mammalian cell include the use of ARCUS™ meganucleases that can be rationally designed so as to site-specifically cleave genomic DNA. The use of these enzymes for the incorporation of genes encoding water-forming NADH or NADPH oxidases into the genome of a mammalian cell is particularly advantageous in view of the structure-activity relationships that have been established for such enzymes. Single chain meganucleases can be modified at certain amino acid positions in order to create nucleases that selectively cleave DNA at desired locations. These single-chain nucleases have been described extensively, e.g., in U.S. Pat. Nos. 8,021,867 and 8,445,251, the teachings of which are incorporated herein by reference.

[0133] Protein Prosthesis Therapy

[0134] Water-forming NADH or NADPH oxidases (for instance, a water-forming NADH oxidase having the amino acid sequence of any one of SEQ ID NOs: 1-273 and variants thereof, such as a water-forming NADH oxidase having the amino acid sequence of any one of SEQ ID NOs: 1-5, or a water-forming NADPH oxidase having the amino acid sequence of SEQ ID NO: 329 or 330 and variants thereof) can also be administered directly to a patient in order to treat a disease associated with mitochondrial defect. Delivering whole proteins across the mammalian cell membrane has posed a challenge to the medicinal chemistry community, since the large size and hydrophilic exterior of many proteins renders these molecules difficult and often intractable substrates for traversing the lipophilic environment of the plasma membrane (Benson, et al., J. Pharm. Sci., 97:3591-3610, 2008). However, the need to deliver whole proteins into the cytosol of a mammalian cell has inspired the development of a variety of strategies that can be used for translocating water-forming NADH oxidases across the cell membrane (Pisal, et al., J. Pharm. Sci., 99:2557-2575, 2010). A common method for protein delivery into a mammalian cell has been to deliver the protein in combination with a liposome. Liposomes are synthetic vesicles that contain a lipid bilayer separated exterior that surrounds an aqueous interior. Liposomes offer the ability to bind to and fuse with the mammalian cell membrane, releasing proteins that stored in the aqueous interior of the liposome into the cytosol of the target cell. Moreover, liposomes comprised of phospholipids are well-suited for the delivery of water-forming NADH or NADPH oxidases into a mammalian cell. Due to the amphipathic nature of phospholipids, these molecules are compatible with oxidases that are derived from a diversity of sources and that may present different physicochemical properties.

[0135] Supramolecular complexes, such as liposomes, nanoparticles, and nanospheres, capable of encapsulating water-forming NADH or NADPH oxidases (for instance, a water-forming NADH oxidase having the amino acid sequence of any one of SEQ ID NOs: 1-273 and variants thereof, such as a water-forming NADH oxidase having the amino acid sequence of any one of SEQ ID NOs: 1-5, or a water-forming NADPH oxidase having the amino acid sequence of SEQ ID NO: 329 or 330 and variants thereof) can be used in order to efficiently deliver these enzymes to the mammalian cell interior with minimal degradation of the protein before it reaches the cellular target. For instance, nanoparticles and liposomes can be conjugated to extended hydrophilic polymers, such as polyethylene glycol (PEG), or hyperglycosylated by conjugation with carbohydrates, such as polysialic acid (PSA), in order to improve the solubility of these complexes in aqueous solution and to mask these complexes from recognition by the immune system. The mounting of an adaptive immune response by a patient in the form of antibodies raised against liposomes represents one means by which the water-forming NADH or NADPH oxidase can be degraded in serum of a patient before reaching a cellular target. This can result in early clearance of these enzymes from serum and a poor pharmacokinetic profile. Premature degradation can be prevented by conjugation of liposomes to PEG or PSA, which sterically preclude the binding of surface antigens to B-cell receptors and thus attenuate immunogenicity of the complex (Gregoriadis, Int. J. Pharm., 300:125-130, 2005). Methods for the use of liposomes to enable protein delivery have been described in detail in WO 2013/140643, WO 2005/051351, and WO 2001/043778, each of which is incorporated herein by reference.

[0136] Microspheres represent an additional tool for the delivery of protein therapeutics across the mammalian cell membrane. Encapsulation of a water-forming NADH or NADPH oxidase (for instance, a water-forming NADH oxidase having the amino acid sequence of any one of SEQ ID NOs: 1-273 and variants thereof, such as a water-forming NADH oxidase having the amino acid sequence of any one of SEQ ID NOs: 1-5, or a water-forming NADPH oxidase having the amino acid sequence of SEQ ID NO: 329 or 330 and variants thereof) within a microsphere offers beneficial features similar to nanoparticles and liposomes, as these vesicle-like structures protect protein cargo buried in the microsphere interior from degradation. Microspheres, particularly those comprised of hydrophilic polymers such as poly(D,L-lactic-coglycolic-acid) (PLGA), are water-soluble, biodegradable, and can facilitate the extended release of a water-forming NADH or NADPH oxidase over the course of days, weeks, or even months. Microspheres feature a high degree of tensile strength and can be tuned so as to achieve an ideal rate of release of proteins encapsulated in the interior. These complexes have been used for the delivery of a variety of therapeutic proteins, and are discussed in further detail in Cai, et al., Biomaterials, 24:629-638, 2003; Sing, Int. J. Pharm., 341:68-77, 2007; and Mundargi, J. Control. Release., 125:193-209, 2008, the teachings of each of which is incorporated herein by reference.

[0137] Therapeutic Conjugates and Fusion Proteins Containing Water-Forming NADH or NADPH Oxidases

[0138] Prior to administration of a water-forming NADH or NADPH oxidase (for instance, a water-forming NADH oxidase having the amino acid sequence of any one of SEQ ID NOs: 1-273 and variants thereof, such as a water-forming NADH oxidase having the amino acid sequence of any one of SEQ ID NOs: 1-5, or a water-forming NADPH oxidase having the amino acid sequence of SEQ ID NO: 329 or 330 and variants thereof) for use in the compositions and methods of the invention to a patient (e.g., a human patient), it may be desirable to conjugate the enzyme to a second molecule in order to modulate the activity of the enzyme for in vivo applications. Water-forming NADH or NADPH oxidases can be conjugated to other molecules at either the N-terminus or C-terminus of the enzyme using any one of a variety of established conjugation strategies that are well-known in the art. Examples of pairs of reactive functional groups that can be used to covalently tether a water-forming NADH or NADPH oxidase to another molecule include, without limitation, thiol pairs, carboxylic acids and amino groups, ketones and amino groups, aldehydes and amino groups, thiols and alpha, beta-unsaturated moieties (such as maleimides or dehydroalanine), thiols and alpha-halo amides, carboxylic acids and hydrazides, aldehydes and hydrazides, and ketones and hydrazides.

[0139] Water-forming NADH or NADPH oxidases (for instance, a water-forming NADH oxidase having the amino acid sequence of any one of SEQ ID NOs: 1-273 and variants thereof, such as a water-forming NADH oxidase having the amino acid sequence of any one of SEQ ID NOs: 1-5, or a water-forming NADPH oxidase having the amino acid sequence of SEQ ID NO: 329 or 330 and variants thereof) can be covalently appended directly to another molecule by chemical conjugation as described. Alternatively, fusion proteins containing water-forming NADH or NADPH oxidases can be expressed recombinantly from a cell (e.g., a mammalian cell). This can be accomplished, for example, by incorporating a polynucleotide encoding the fusion protein into the nuclear genome of a cell using genome editing techniques, such as those described herein or known in the art. Optionally, these enzymes can be joined to a second molecule by forming a covalent bond between the oxidase and a linker. This linker can then be subsequently conjugated to another molecule, or the linker can be conjugated to another molecule prior to ligation to the water-forming NADH or NADPH oxidase. Examples of linkers that can be used for the formation of a conjugate include polypeptide linkers, such as those that contain naturally occurring or non-naturally occurring amino acids. In certain cases, it may be desirable to include D-amino acids in the linker, as these residues are not present in naturally-occurring proteins and are thus more resistant to degradation by endogenous proteases. Fusion proteins containing polypeptide linkers can be made using chemical synthesis techniques, such as those described herein, or through recombinant expression of a polynucleotide encoding the fusion protein in a cell (e.g., a mammalian cell). Linkers can be prepared using a variety of strategies that are well known in the art, and depending on the reactive components of the linker, can be cleaved by enzymatic hydrolysis, photolysis, hydrolysis under acidic conditions, hydrolysis under basic conditions, oxidation, disulfide reduction, nucleophilic cleavage, or organometallic cleavage (Leriche, et al., Bioorg. Med. Chem., 20:571-582, 2012).

[0140] Water-forming NADH or NADPH oxidase conjugates may also be produced using, e.g., a linker that joins the NADH or NADPH oxidase to its fusion partner and that is cleavable by intracellular enzymes. The linker can be designed so that it can be cleaved in order to separate the two agents at a particular time or cellular location. Examples of such linkers include polypeptides that include an amino acid sequence that is selectively recognized and cleaved by proteases, such as, e.g., trypsin, chymotrypsin, thrombin, and pepsin, among others.

[0141] Water-forming NADH or NADPH oxidases (for instance, a water-forming NADH oxidase having the amino acid sequence of any one of SEQ ID NOs: 1-273 and variants thereof, such as a water-forming NADH oxidase having the amino acid sequence of any one of SEQ ID NOs: 1-5, or a water-forming NADPH oxidase having the amino acid sequence of SEQ ID NO: 329 or 330 and variants thereof) can be conjugated to other molecules for the purpose of improving the solubility and stability of the protein in aqueous solution. Examples of such molecules include PEG, PSA, bovine serum albumin (BSA), and human serum albumin (HSA), among others. For instance, one can conjugate a water-forming NADH or NADPH oxidase to carbohydrate moieties in order to evade detection of the enzyme by the immune system of the patient receiving treatment. This process of hyperglycosylation reduces the immunogenicity of therapeutic proteins by sterically inhibiting the interaction of the protein with B-cell receptors in circulation. Alternatively, water-forming NADH or NADPH oxidases can be conjugated to molecules that prevent clearance from human serum and improve the pharmacokinetic profile of these oxidases. For instance, one may conjugate a water-forming NADH or NADPH oxidase to an antibody Fc region. These antibody domains impart protein therapeutics with an enhanced serum half-life by interacting with specific serum proteins. In this way, water-forming NADH OR NADPH oxidases can evade premature clearance from circulation and exhibit an improved pharmacokinetic profile.

[0142] Additional conjugates of water-forming NADH or NADPH oxidases that can be formed for therapeutic applications include those that contain cell-penetrating peptides (CPPs). CPPs are polypeptides that contain an abundance of cationic amino acids and, as such, engage in strong ionic contacts with the negatively charged exterior of the mammalian cell membrane. These compounds are capable of penetrating the cell membrane by one of a variety of mechanisms, including destabilization of the membrane structure, pore formation, endocytosis, and macropinocytosis, among others. CPPs have been shown not only to translocate across the mammalian cell membrane, but are also capable of delivering other molecules to which these compounds are covalently bound into the mammalian cell interior. The use of CPPs is described in Snyder, et al., (Pharm. Res., 21:389-393, 2004), the teachings of which are incorporated by reference. Examples of cell penetrating peptides that can be conjugated to water-forming NADH or NADPH oxidases are provided in SEQ ID NOs: 279-297. For instance, one can conjugate the N-terminal amine of a water-forming NADH or NADPH oxidase to the C-terminal carboxylate of a cell penetrating peptide by formation of an amide bond using amide-bond forming reagents and processes known in the art.

[0143] Water-forming NADH or NADPH oxidases (for instance, a water-forming NADH oxidase having the amino acid sequence of any one of SEQ ID NOs: 1-273 and variants thereof, such as a water-forming NADH oxidase having the amino acid sequence of any one of SEQ ID NOs: 1-5, or a water-forming NADPH oxidase having the amino acid sequence of SEQ ID NO: 329 or 330 and variants thereof) can also be conjugated to molecules that direct these enzymes to particular sub-cellular locations, including specific organelles. Examples of organelles to which a water-forming NADH or NADPH oxidase for use in the compositions and methods of the invention can be localized in this manner include the mitochondria, peroxisome, and golgi complexes, among others. For example, it may be desirable to target a therapeutic water-forming NADH or NADPH oxidase to the mitochondria of a patient (e.g., a human patient) in order to provide an enzyme capable of bypassing a deficient or inactive respiratory chain. One can conjugate a water-forming NADH or NADPH oxidase for use in the compositions and methods of the invention to a mitochondrial targeting sequence (MTS) derived from any mitochondrial protein that is produced outside of the mitochondria. Prediction of the MTS from a given protein is routine in the art, and methods describing the prediction of such sequences are described in Claros, et al., Eur. J. Biochem., 241:779-786, 1996, the teachings of which are incorporated herein by reference. The water-forming NADH oxidase can be conjugated to a MTS through recombinant techniques or chemical synthesis (e.g., covalently joining a reactive functional group of the enzyme, such as the N-terminal amine or C-terminal carboxylate, with a reactive functional group of the MTS peptide using conventional covalent bond-forming methodologies that are known in the art). Examples of mitochondrial targeting sequences include the MTS of subunit IV of human cytochrome c oxidase (SEQ ID NO: 298), a MTS derived from a mitochondrial enzyme, such as fumarase (MLRFTNCSCKTFVKSSYKLNIRRMNSSFRT, SEQ ID NO: 299) or aconitase (MLSARSAIKRPIVRGLATV, SEQ ID NO: 300), as well as chimeric sequences that include residues from the MTS motifs of two different mitochondrial proteins (e.g., MLSARSAIKRPIVRGLATVSSFRT, SEQ ID NO: 301; MLRSSVVRSRATLRPLLRRAYSSSFRT, SEQ ID NO: 302; MLRFTNCSCKTFVKSSYKLNIRRMNTV, SEQ ID NO: 303; MLSARSAIKRPIVRGLATV, SEQ ID NO: 304; MLSRRSAIKRPIVRGLATV, SEQ ID NO: 305; MLSASSAIKRPIVRGLATV, SEQ ID NO: 306; MLSARSARKRPIVRGLATV, SEQ ID NO: 307; MLSARSAICRPIVRGLATV, SEQ ID NO: 308; MLSTAYAIKRPIVRGLATV, SEQ ID NO: 309; MLSARSAIPIPIVRGLATV, SEQ ID NO: 310; MLSARSAIKRPIVRGYKLNIRRMNTV, SEQ ID NO: 311; MLSARSAIKRPIVRGKRPIVRGLATV, SEQ ID NO: 312; MLSFTNCSCKTFVKSSYKLNIRRMN, SEQ ID NO: 313; MLRFRNCSCKTFVKSSYKLNIRRMN, SEQ ID NO: 314; MLRFTNCSKKTFVKSSYKLNIRRMN, SEQ ID NO: 315; described in detail by Regev-Rudzki, et al., J. Cell. Sci., 121:2423-2431, 2008, the teachings of which are incorporated herein by reference).

[0144] In certain cases, it may be desirable to covalently conjugate the enzymes for use in the compositions and methods of the invention with a chelating group capable of binding a metal ion from heavy elements or rare earth ions, such as Gd³⁺, Fe³⁺, Mn³⁺, or Cr²⁺. Conjugates containing chelating groups that are coordinated to such paramagnetic metals are useful as in MRI imaging applications. Paramagnetic metals include, but are not limited to, chromium (III), manganese (II), iron (II), iron (III), cobalt (II), nickel (II), copper (II), praseodymium (III), neodymium (III), samarium (III), gadolinium (III), terbium (III), dysprosium (III), holmium (III), erbium (III), and ytterbium (III). In this way, water-forming NADH or NADPH oxidases can be detected by MRI spectroscopy. For instance, one can administer water-forming NADH or NADPH oxidases conjugated to chelating groups bound to paramagnetic ions to a patient (e.g., a human patient) in order to monitor the distribution of the enzyme following administration. This can be achieved by administration of the enzyme to a patient by any of the administration routes described herein, such as intravenously, and subsequently analyzing the location of the administered enzymes by recording an MRI of the patient according to established protocols.

[0145] Water-forming NADH or NADPH oxidases (for instance, a water-forming NADH oxidase having the amino acid sequence of any one of SEQ ID NOs: 1-273 and variants thereof, such as a water-forming NADH oxidase having the amino acid sequence of any one of SEQ ID NOs: 1-5, or a water-forming NADPH oxidase having the amino acid sequence of SEQ ID NO: 329 or 330 and variants thereof) can additionally be conjugated to a cytotoxic molecule. Such conjugates may be applicable to the treatment, prevention, or analysis of a disease associated with aberrant cell proliferation. Examples of such diseases that may be amenable to treatment with conjugates comprising a water-forming NADH or NADPH oxidase and a cytotoxic agent include, without limitation, breast cancer, paraganglioma, phaeochromocytoma, leiomyoma, leiomyosarcoma, and renal cell carcinoma. Exemplary cytotoxic molecules that can be conjugated to, admixed with, or administered separately from a water-forming NADH or NADPH oxidase include, without limitation, antineoplastic agents such as: acivicin; aclarubicin; acodazole hydrochloride; acronine; adozelesin; adriamycin; aldesleukin; altretamine; ambomycin; a. metantrone acetate; aminoglutethimide; amsacrine; anastrozole; anthramycin; asparaginase; asperlin; azacitidine; azetepa; azotomycin; batimastat; benzodepa; bicalutamide; bisantrene hydrochloride; bisnafide dimesylate; bizelesin; bleomycin sulfate; brequinar sodium; bropirimine; busulfan; cactinomycin; calusterone; camptothecin; caracemide; carbetimer; carboplatin; carmustine; carubicin hydrochloride; carzelesin; cedefingol; chlorambucil; cirolemycin; cisplatin; cladribine; combretestatin a-4; crisnatol mesylate; cyclophosphamide; cytarabine; dacarbazine; daca (n-[2-(dimethyl-amino) ethyl] acridine-4-carboxamide); dactinomycin; daunorubicin hydrochloride; daunomycin; decitabine; dexormaplatin; dezaguanine; dezaguanine mesylate; diaziquone; docetaxel; dolasatins; doxorubicin; doxorubicin hydrochloride; droloxifene; droloxifene citrate; dromostanolone propionate; duazomycin; edatrexate; eflornithine hydrochloride; ellipticine; elsamitrucin; enloplatin; enpromate; epipropidine; epirubicin hydrochloride; erbulozole; esorubicin hydrochloride; estramustine; estramustine phosphate sodium; etanidazole; ethiodized oil i 131; etoposide; etoposide phosphate; etoprine; fadrozole hydrochloride; fazarabine; fenretinide; floxuridine; fludarabine phosphate; fluorouracil; 5-fdump; flurocitabine; fosquidone; fostriecin sodium; gemcitabine; gemcitabine hydrochloride; gold au 198; homocamptothecin; hydroxyurea; idarubicin hydrochloride; ifosfamide; ilmofosine; interferon alfa-2a; interferon alfa-2b; interferon alfa-nl; interferon alfa-n3; interferon beta-i a; interferon gamma-i b; iproplatin; irinotecan hydrochloride; lanreotide acetate; letrozole; leuprolide acetate; liarozole hydrochloride; lometrexol sodium; lomustine; losoxantrone hydrochloride; masoprocol; maytansine; mechlorethamine hydrochloride; megestrol acetate; melengestrol acetate; melphalan; menogaril; mercaptopurine; methotrexate; methotrexate sodium; metoprine; meturedepa; mitindomide; mitocarcin; mitocromin; mitogillin; mitomalcin; mitomycin; mitosper; mitotane; mitoxantrone hydrochloride; mycophenolic acid; nocodazole; nogalamycin; ormaplatin; oxisuran; paclitaxel; pegaspargase; peliomycin; pentamustine; peploycinsulfate; perfosfamide; pipobroman; piposulfan; piroxantrone hydrochloride; plicamycin; plomestane; porfimer sodium; porfiromycin; prednimustine; procarbazine hydrochloride; puromycin; puromycin hydrochloride; pyrazofurin; rhizoxin; rhizoxin d; riboprine; rogletimide; safingol; safingol hydrochloride; semustine; simtrazene; sparfosate sodium; sparsomycin; spirogermanium hydrochloride; spiromustine; spiroplatin; streptonigrin; streptozocin; strontium chloride sr 89; sulofenur; talisomycin; taxane; taxoid; tecogalan sodium; tegafur; teloxantrone hydrochloride; temoporfin; teniposide; teroxirone; testolactone; thiamiprine; thioguanine; thiotepa; thymitaq; tiazofurin; tirapazamine; tomudex; top53; topotecan hydrochloride; toremifene citrate; trestolone acetate; triciribine phosphate; trimetrexate; trimetrexate glucuronate; triptorelin; tubulozole hydrochloride; uracil mustard; uredepa; vapreotide; verteporfin; vinblastine; vinblastine sulfate; vincristine; vincristine sulfate; vindesine; vindesine sulfate; vinepidine sulfate; vinglycinate sulfate; vinleurosine sulfate; vinorelbine tartrate; vinrosidine sulfate; vinzolidine sulfate; vorozole; zeniplatin; zinostatin; zorubicin hydrochloride; 2-chlorodeoxyadenosine; 2′ deoxyformycin; 9-aminocamptothecin; raltitrexed; N-propargyl-5,8-dideazafolic acid; 2chloro-2′-arabino-fluoro-2′-deoxyadenosine; 2-chloro-2′-deoxyadenosine; anisomycin; trichostatin A; hPRL-G129R; CEP-751; linomide; sulfur mustard; nitrogen mustard (mechlor ethamine); cyclophosphamide; melphalan; chlorambucil; ifosfamide; busulfan; N-methyl-Nnitrosourea (MNU); N, N′-Bis (2-chloroethyl)-N-nitrosourea (BCNU); N-(2-chloroethyl)-N′ cyclohexyl-N-nitrosourea (CCNU); N-(2-chloroethyl)-N′-(trans-4-methylcyclohexyl-N-nitrosourea (MeCCNU); N-(2-chloroethyl)-N′-(diethyl) ethylphosphonate-N-nitrosourea (fotemustine); streptozotocin; diacarbazine (DTIC); mitozolomide; temozolomide; thiotepa; mitomycin C; AZQ; adozelesin; cisplatin; carboplatin; ormaplatin; oxaliplatin; C1-973; DWA 2114R; JM216; JM335; Bis (platinum); tomudex; azacitidine; cytarabine; gemcitabine; 6-mercaptopurine; 6-thioguanine; hypoxanthine; teniposide 9-amino camptothecin; topotecan; CPT-11; Doxorubicin; Daunomycin; Epirubicin; darubicin; mitoxantrone; losoxantrone; Dactinomycin (Actinomycin D); amsacrine; pyrazoloacridine; all-trans retinol; 14-hydroxy-retro-retinol; all-trans retinoic acid; N-(4-hydroxyphenyl) retinamide; 13-cis retinoic acid; 3-methyl TTNEB; 9-cis retinoic acid; fludarabine (2-F-ara-AMP); or 2-chlorodeoxyadenosine (2-Cda).

[0146] Other therapeutic compounds that can be conjugated to, admixed with, or administered separately from a water-forming NADH or NADPH oxidase in order to treat, prevent, or study the progression of a disease associated with aberrant cell proliferation include, but are not limited to, 20-pi-1,25 dihydroxyvitamin D3; 5-ethynyluracil; abiraterone; acylfulvene; adecypenol; adozelesin; aldesleukin; ALL-TK antagonists; altretamine; ambamustine; amidox; amifostine; aminolevulinic acid; amrubicin; amsacrine; anagrelide; anastrozole; andrographolide; angiogenesis inhibitors; antagonist D; antagonist G; antarelix; anti-dorsalizing morphogenetic protein-1; antiandrogen, prostatic carcinoma; antiestrogen; antineoplaston; antisense oligonucleotides; aphidicolin glycinate; apoptosis gene modulators; apoptosis regulators; apurinic acid; ara-CDP-DL-PTBA; argininedeaminase; asulacrine; atamestane; atrimustine; axinastatin 1; axinastatin 2; axinastatin 3; azasetron; azatoxin; azatyrosine; baccatin III derivatives; balanol; batimastat; BCR/ABL antagonists; benzochlorins; benzoylstaurosporine; beta lactam derivatives; beta-alethine; betaclamycin B; betulinic acid; bFGF inhibitor; bicalutamide; bisantrene; bisaziridinylspermine; bisnafide; bistratene A; bizelesin; breflate; bleomycin A2; bleomycin B2; bropirimine; budotitane; buthionine sulfoximine; calcipotriol; calphostin C; camptothecin derivatives (e.g., 10-hydroxy-camptothecin); canarypox IL-2; capecitabine; carboxamide-amino-triazole; carboxyamidotriazole; CaRest M3; CARN 700; cartilage derived inhibitor; carzelesin; casein kinase inhibitors (ICOS); castanospermine; cecropin B; cetrorelix; chlorins; chloroquinoxaline sulfonamide; cicaprost; cis-porphyrin; cladribine; clomifene analogues; clotrimazole; collismycin A; collismycin B; combretastatin A4; combretastatin analogue; conagenin; crambescidin 816; crisnatol; cryptophycin 8; cryptophycin A derivatives; curacin A; cyclopentanthraquinones; cycloplatam; cypemycin; cytarabine ocfosfate; cytolytic factor; cytostatin; dacliximab; decitabine; dehydrodidemnin B; 2′deoxycoformycin (DCF); deslorelin; dexifosfamide; dexrazoxane; dexverapamil; diaziquone; didemnin B; didox; diethylnorspermine; dihydro-5-azacytidine; dihydrotaxol, 9-; dioxamycin; diphenyl spiromustine; discodermolide; docosanol; dolasetron; doxifluridine; droloxifene; dronabinol; duocarmycin SA; ebselen; ecomustine; edelfosine; edrecolomab; eflornithine; elemene; emitefur; epirubicin; epothilones (A, R═H; B, R═Me); epithilones; epristeride; estramustine analogue; estrogen agonists; estrogen antagonists; etanidazole; etoposide; etoposide 4′-phosphate (etopofos); exemestane; fadrozole; fazarabine; fenretinide; filgrastim; finasteride; flavopiridol; flezelastine; fluasterone; fludarabine; fluorodaunorunicin hydrochloride; forfenimex; formestane; fostriecin; fotemustine; gadolinium texaphyrin; gallium nitrate; galocitabine; ganirelix; gelatinase inhibitors; gemcitabine; glutathione inhibitors; hepsulfam; heregulin; hexamethylene bisacetamide; homoharringtonine (HHT); hypericin; ibandronic acid; idarubicin; idoxifene; idramantone; ilmofosine; ilomastat; imidazoacridones; imiquimod; immunostimulant peptides; insulin-like growth factor-1 receptor inhibitor; interferon agonists; interferons; interleukins; iobenguane; iododoxorubicin; ipomeanol, 4-; irinotecan; iroplact; irsogladine; isobengazole; isohomohalicondrin B; itasetron; jasplakinolide; kahalalide F; lamellarin-N triacetate; lanreotide; leinamycin; lenograstim; lentinan sulfate; leptolstatin; letrozole; leukemia inhibiting factor; leukocyte alpha interferon; leuprolide+estrogen+progesterone; leuprorelin; levamisole; liarozole; linear polyamine analogue; lipophilic disaccharide peptide; lipophilic platinum compounds; lissoclinamide 7; lobaplatin; lombricine; lometrexol; lonidamine; losoxantrone; lovastatin; loxoribine; lurtotecan; lutetium texaphyrin; lysofylline; lytic peptides; maytansine; mannostatin A; marimastat; masoprocol; maspin; matrilysin inhibitors; matrix metalloproteinase inhibitors; menogaril; rnerbarone; meterelin; methioninase; metoclopramide; MIF inhibitor; ifepristone; miltefosine; mirimostim; mismatched double stranded RNA; mithracin; mitoguazone; mitolactol; mitomycin analogues; mitonafide; mitotoxin fibroblast growth factor-saporin; mitoxantrone; mofarotene; molgramostim; monoclonal antibody, human chorionic gonadotrophin; monophosphoryl lipid A+myobacterium cell wall sk; mopidamol; multiple drug resistance gene inhibitor; multiple tumor suppressor 1-based therapy; mustard anticancer agent; mycaperoxide B; mycobacterial cell wall extract; myriaporone; N-acetyldinaline; N-substituted benzamides; nafarelin; nagrestip; naloxone+pentazocine; napavin; naphterpin; nartograstim; nedaplatin; nemorubicin; neridronic acid; neutral endopeptidase; nilutamide; nisamycin; nitric oxide modulators; nitroxide antioxidant; nitrullyn; 06-benzylguanine; octreotide; okicenone; oligonucleotides; onapristone; ondansetron; ondansetron; oracin; oral cytokine inducer; ormaplatin; osaterone; oxaliplatin; oxaunomycin; paclitaxel analogues; paclitaxel derivatives; palauamine; palmitoylrhizoxin; pamidronic acid; panaxytriol; panomifene; parabactin; pazelliptine; pegaspargase; peldesine; pentosan polysulfate sodium; pentostatin; pentrozole; perflubron; perfosfamide; perillyl alcohol; phenazinomycin; phenylacetate; phosphatase inhibitors; picibanil; pilocarpine hydrochloride; pirarubicin; piritrexim; placetin A; placetin B; plasminogen activator inhibitor; platinum complex; platinum compounds; platinum-triamine complex; podophyllotoxin; porfimer sodium; porfiromycin; propyl bis-acridone; prostaglandin J2; proteasome inhibitors; protein A-based immune modulator; protein kinase C inhibitor; protein kinase C inhibitors, microalgal; protein tyrosine phosphatase inhibitors; purine nucleoside phosphorylase inhibitors; purpurins; pyrazoloacridine; pyridoxylated hemoglobin polyoxyethylene conjugate; raf antagonists; raltitrexed; ramosetron; ras farnesyl protein transferase inhibitors; ras inhibitors; ras-GAP inhibitor; retelliptine demethylated; rhenium Re 186 etidronate; rhizoxin; ribozymes; RII retinamide; rogletimide; rohitukine; romurtide; roquinimex; rubiginone B 1; ruboxyl; safingol; saintopin; SarCNU; sarcophytol A; sargramostim; Sdi 1 mimetics; semustine; senescence derived inhibitor 1; sense oligonucleotides; signal transduction inhibitors; signal transduction modulators; single chain antigen binding protein; sizofiran; sobuzoxane; sodium borocaptate; sodium phenylacetate; solverol; somatomedin binding protein; sonermin; sparfosic acid; spicamycin D; spiromustine; splenopentin; spongistatin 1; squalamine; stem cell inhibitor; stem-cell division inhibitors; stipiamide; stromelysin inhibitors; sulfinosine; superactive vasoactive intestinal peptide antagonist; suradista; suramin; swainsonine; synthetic glycosaminoglycans; tallimustine; tamoxifen methiodide; tauromustine; tazarotene; tecogalan sodium; tegafur; tellurapyrylium; telomerase inhibitors; temoporfin; temozolomide; teniposide; tetrachlorodecaoxide; tetrazomine; thaliblastine; thalidomide; thiocoraline; thrombopoietin; thrombopoietin mimetic; thymalfasin; thymopoietin receptor agonist; thymotrinan; thyroid stimulating hormone; tin ethyl etiopurpurin; tirapazamine; titanocene dichloride; topotecan; topsentin; toremifene; totipotent stem cell factor; translation inhibitors; tretinoin; triacetyluridine; triciribine; trimetrexate; triptorelin; tropisetron; turosteride; tyrosine kinase inhibitors; tyrphostins; UBC inhibitors; ubenimex; urogenital sinus-derived growth inhibitory factor; urokinase receptor antagonists; vapreotide; variolin B; vector system, erythrocyte gene therapy; velaresol; veramine; verdins; verteporfin; vinorelbine; vinxaltine; vitaxin; vorozole; zanoterone; zeniplatin; zilascorb; and zinostatin stimalamer.

[0147] In addition to the conjugates described above, it may optionally be desirable to conjugate a water-forming NADH or NADPH oxidase to an antibody that selectively recognizes a particular antigen. Antibody conjugation represents a useful strategy for directing a water-forming NADH or NADPH oxidase to a particular target cell, e.g., a cancerous human cell. Alternatively, water-forming NADH or NADPH oxidases may be admixed with a therapeutic antibody in a single pharmaceutical composition. In certain cases, it may be desirable to administer a water-forming NADH or NADPH oxidase and a therapeutic antibody to a patient in separate pharmaceutical compositions. For instance, a patient receiving treatment for a cell proliferation disease, such as cancer, by administration of water-forming NADH or NADPH oxidases may optionally be treated with water-forming NADH or NADPH oxidases that are conjugated to, admixed with, or administered separately from a monoclonal antibody that selectively recognizes and binds an antigen that is expressed by a cancer cell. Examples of FDA-approved monoclonal antibodies that can be conjugated to, admixed with, or administered separately from a water-forming NADH or NADPH oxidase for the purposes of treating a patient suffering from a cell proliferation disorder (e.g., cancer) include Trastuzamb (HERCEPTIN®), Bevacizumab (AVASTIN®), Cetuximab (ERBITUX®), Panitumumab (VECTIBIX®), Ipilimumab (YERVOY®), Rituximab (RITUXAN® and MABTHERA®), Alemtuzumab (CAMPATH®), Ofatumumab (ARZERRA®), Gemtuzumab ozogamicin (MYLOTARG®), Brentuximab vedotin (ADCETRIS®), ⁹⁰Y-Ibritumomab Tiuxetan (ZEVALIN®), and ¹³¹I-Tositumomab (BEXXAR®), which are described in detail in Scott, et al., Cancer Immun., 12:14-21, 2012, the teachings of which are incorporated herein by reference.

[0148] Pharmaceutical Formulations

[0149] Therapeutic formulations of a composition comprising a water-forming NADH or NADPH oxidase (for instance, a water-forming NADH oxidase having the amino acid sequence of any one of SEQ ID NOs: 1-273 and variants thereof, such as a water-forming NADH oxidase having the amino acid sequence of any one of SEQ ID NOs: 1-5, or a water-forming NADPH oxidase having the amino acid sequence of SEQ ID NO: 329 or 330 and variants thereof), a conjugate comprising the water-forming NADH or NADPH oxidase, a polynucleotide encoding the water-forming NADH or NADPH oxidase or a conjugate thereof, or a vector comprising such a polynucleotide can be prepared using methods known in the art. For example, such compositions can be prepared using, e.g., physiologically acceptable carriers, excipients or stabilizers (Remington's Pharmaceutical Sciences 16th edition, Osol, A. Ed. (1980), incorporated herein by reference), and in a desired form, e.g., in the form of lyophilized formulations or aqueous solutions. The compositions can also be prepared so as to contain the active agent (e.g., water-forming NADH or NADPH oxidase, polynucleotide encoding a water-forming NADH or NADPH oxidase, a vector containing such a polynucleotide, a mammalian cell that expresses a water-forming NADH oxidase) at a desired level of purity. For example, a pharmaceutical formulation for use with the methods of the invention may contain at least 10% (e.g., 10%, 20%, 30%, 40%, 50%, 60%, 70%, 80%, 90%, 95%, 97%, 98%, 99%, 99.5%, 99.9%, or 100%) active agent by weight (w/w). Additionally, an active agent, e.g., a water-forming NADH or NADPH oxidase, that can be incorporated into a pharmaceutical formulation can itself have a desired level of purity relative to the mixture from which the enzyme is isolated or produced. For instance, a water-forming NADH or NADPH oxidase for use with the methods and compositions of the invention may be at least 10% pure (e.g., 10%, 20%, 30%, 40%, 50%, 60%, 70%, 80%, 90%, 95%, 97%, 98%, 99%, 99.5%, 99.9%, or 100% pure). Acceptable carriers, excipients, or stabilizers are nontoxic to patients at the dosages and concentrations employed, and include buffers, such as phosphate, citrate, and other organic acids; antioxidants, including ascorbic acid and methionine; preservatives (such as octadecyldimethylbenzyl ammonium chloride; hexamethonium chloride; benzalkonium chloride, benzethonium chloride; phenol, butyl or benzyl alcohol; alkyl parabens, such as methyl or propyl paraben; catechol; resorcinol; cyclohexanol; 3-pentanol; and m-cresol); low molecular weight (less than about 10 residues) polypeptides; proteins, such as serum albumin, gelatin, or immunoglobulins; hydrophilic polymers such as polyvinylpyrrolidone; amino acids, such as glycine, glutamine, asparagine, histidine, arginine, or lysine; monosaccharides, disaccharides, and other carbohydrates including glucose, mannose, or dextrins; chelating agents, such as EDTA; sugars such as sucrose, mannitol, trehalose or sorbitol; salt-forming counter-ions, such as sodium; metal complexes (e.g., Zn-protein complexes); and/or non-ionic surfactants such as TWEEN™, PLURONICS™, or polyethylene glycol (PEG).

[0150] The pharmaceutically acceptable carrier may alternatively comprise dextrose, sucrose, sorbitol, mannitol, starch, rubber arable, potassium phosphate, arginate, gelatin, potassium silicate, microcrystalline cellulose, polyvinylpyrrolidone, cellulose, water, syrups, methyl cellulose, methylhydroxy benzoate, propylhydroxy benzoate, talc, magnesium stearate, and mineral oils, but not limited to. A composition containing a water-forming NADH or NADPH oxidase according to the invention may further include a lubricant, a humectant, a sweetener, a flavoring agent, an emulsifier, a suspending agent, and a preservative. Details of suitable pharmaceutically acceptable carriers and formulations can be found in Remington's Pharmaceutical Sciences (19th ed., 1995), which is incorporated herein by reference.

[0151] Pharmaceutical compositions of the invention may include more than one active agent. For instance, a fusion protein of the invention may contain a water-forming NADH or NADPH oxidase conjugated to another pharmaceutically active molecule, such as those described herein. Pharmaceutical compositions of the invention may optionally include more than one active compound. For instance, a water-forming NADH or NADPH oxidase or therapeutic fusion protein thereof, polynucleotide encoding a water-forming NADH or NADPH oxidase, vector containing such a polynucleotide, or mammalian cell that expresses a water-forming NADH or NADPH oxidase may be admixed with one or more additional active agents that can be used to treat mitochondrial dysfunction or oxidative stress. Alternatively, pharmaceutical compositions of the invention may be formulated for co-administration with one or more additional active agents that can be used to treat mitochondrial dysfunction or oxidative stress. Examples of additional active agents that can be used to treat mitochondrial dysfunction or oxidative stress and that can be conjugated to, admixed with, or administered separately from include antioxidants, such as glutathione and detoxification enzymes (e.g., UDP-glucuronosyltransferases, sulfotransferases, phenol-O-methyltransferase, catechol-O-methyltransferase, histamine N-methyltransferase, nicotinamide N-methyltransferase, thiopurine methyltransferase, thiol methyltransferase, N-acetyltransferases, 0-acetyltransferases, acyl-CoA synthetases, acyl-CoA:amino acid N-acyltransferases, aminoacyl-tRNA synthetases, glutathione synthetases, gamma glutamylcysteine synthetases, glutathione S-transferases, quinone reductases, heme oxygenases, rhodaneses, glutathione reductase, glutathione peroxidase, catalase and superoxide dismutase, the uses of which are described in detail in U.S. Pat. No. 8,709,406, the teachings of which are incorporated herein by reference).

[0152] Additional active agents that may be used in the treatment of oxidative stress induced by dysfunction of the mitochondrial respiratory chain and may be conjugated to, admixed with, or administered separately from a water-forming NADH or NADPH oxidase include cerium oxide nanoparticles (nanoceria). Such nanoparticles have been shown to promote cell survival in cultured brain cells exposed to lethal concentrations of reactive oxygen species. Efficacious formulations of nanoceria are described in detail in WO 2013/187980, the teachings of which are incorporated herein by reference.

[0153] Other active agents that can be used for the treatment of mitochondrial respiratory chain dysfunction and may be conjugated to, admixed with, or administered separately from a water-forming NADH or NADPH oxidase include pyrimidine nucleotide precursors. These compounds provide a source of important substrates for DNA synthesis that are often not capable of being robustly produced endogenously under conditions in which, for instance, the ratio of mitochondrial NADH to NAD⁺ is elevated. Examples of pyrimidine nucleotide precursors include uridine, cytidine, an acyl derivative of uridine, an acyl derivative of cytidine, orotic acid, an alcohol ester of orotic acid, or a pharmaceutically acceptable salt thereof. These compounds are described in detail in WO 2000/11952, the teachings of which are incorporated herein by reference.

[0154] Preferably the active agents (e.g., those described above) have complementary activities that do not adversely affect each other. For example, it may be desirable to further provide an immunosuppressive agent to the patient so as to attenuate the immune response against a water-forming NADH or NADPH oxidase or in order to prevent allograft rejection upon administration of human cells (e.g., allogeneic cells) expressing water-forming NADH or NADPH oxidases.

[0155] The active ingredients may also be entrapped in microcapsules prepared, for example, by coacervation techniques or by interfacial polymerization, for example, hydroxymethylcellulose or gelatin-microcapsule and poly-(methylmethacylate) microcapsule, respectively, in colloidal drug delivery systems (for example, liposomes, albumin microspheres, microemulsions, nano-particles and nanocapsules) or in macroemulsions. Such techniques are disclosed in Remington's Pharmaceutical Sciences 16th edition, Osol, A. Ed. (1980).

[0156] The formulations of water-forming NADH or NADPH oxidases to be used for in vivo administration may be sterile. This is readily accomplished, e.g., by filtration through sterile filtration membranes or other methods known in the art.

[0157] Sustained-release formulations of water-forming NADH or NADPH oxidases may also be prepared. Suitable examples of sustained-release preparations include semipermeable matrices of solid hydrophobic polymers containing the enzyme, which matrices are in the form of shaped articles, e.g., films, or microcapsule. Examples of sustained-release matrices include polyesters, hydrogels (for example, poly(2-hydroxyethyl-methacrylate), or poly(vinylalcohol)), polylactides (U.S. Pat. No. 3,773,919), copolymers of L-glutamic acid and γ ethyl-L-glutamate, non-degradable ethylene-vinyl acetate, degradable lactic acid-glycolic acid copolymers such as the LUPRON DEPOT™ (injectable microspheres composed of lactic acid-glycolic acid copolymer and leuprolide acetate), and poly-D-(−)-3-hydroxybutyric acid.

[0158] Routes of Administration

[0159] Compositions containing a water-forming NADH or NADPH oxidase (for instance, a water-forming NADH oxidase having the amino acid sequence of any one of SEQ ID NOs: 1-273 and variants thereof, such as a water-forming NADH oxidase having the amino acid sequence of any one of SEQ ID NOs: 1-5, or a water-forming NADPH oxidase having the amino acid sequence of SEQ ID NO: 329 or 330 and variants thereof) may be administered, and formulated for administration, by any route appropriate for therapy of the subject, such as orally, parenterally, intravenously, intramuscularly, by inhalation, intraperitoneally, intraarterially, transdermally, sublingually, nasally, transbuccally, liposomally, adiposally, opthalmically, intraocularly, subcutaneously, intrathecally, topically, or locally. By parenteral administration it is meant that a pharmaceutical composition of the invention may be administered by intravenous, subcutaneous, intramuscular, intraperitoneal, endothelial, local, spleen, pulmonary or rectal administration. For oral administration, active ingredients of oral compositions can be coated or formulated so as to be protected from hydrolysis in the stomach.

[0160] Water-forming NADH or NADPH oxidases (for instance, a water-forming NADH oxidase having the amino acid sequence of any one of SEQ ID NOs: 1-273 and variants thereof, such as a water-forming NADH oxidase having the amino acid sequence of any one of SEQ ID NOs: 1-5, or a water-forming NADPH oxidase having the amino acid sequence of SEQ ID NO: 329 or 330 and variants thereof) can be administered to a patient in order to ameliorate systemic mitochondrial dysfunction using any of the routes of administration described herein. Optionally, water-forming NADH or NADPH oxidases can be administered to a patient so as to direct the therapy to a particular organ. For instance, it may be desirable to target water-forming NADH or NADPH oxidases to the muscles in a patient suffering from muscular atrophy due to a dysfunctional respiratory chain. Targeted administration of water-forming NADH or NADPH oxidases can be achieved by direct administration of the therapy (e.g., water-forming NADH or NADPH oxidases, polynucleotides encoding these enzymes, human cells that have been modified to express these enzymes, etc.) to the muscle tissue by intramuscular injection of a pharmaceutically acceptable formulation containing the water-forming NADH or NADPH oxidase. Alternatively, the enzymes can be modified by covalent attachment of a molecule that selectively recognizes molecular epitopes that are prevalent in particular organs (e.g., muscles, lungs, pancreas, liver, kidneys, intestines, brain, etc.) so as to achieve a high local concentration of the enzymes to the target organ following systemic administration. Examples of such molecules that can be used to promote organ-specific enzyme delivery include antibodies that selectively recognize antigens expressed on the surfaces of muscle fibers and carbohydrates that modulate cellular adhesion. Alternatively, water-forming NADH or NADPH oxidases can be encapsulated within a larger supramolecular complex (e.g., a liposome, nanoparticle, microparticle, etc) and the exterior surface of the complex can be covalently conjugated to a molecule capable of binding and adhering to an organ-specific epitope. Exemplary ligands that can be conjugated to a water-forming NADH or NADPH oxidase or a supramolecular complex containing a water-forming NADH or NADPH oxidase so as to target the therapeutic to a particular organ are described in detail in, e.g., WO 1987/00715, the teachings of which are incorporated herein by reference. In another example, water-forming NADH of NADPH oxidases can be targeted to the brain of a patient suffering from mitochondrial defect by conjugating the enzyme or a complex containing the enzyme to distearoylphosphatidylethanolamine-polyethylene glycol-maleimide, a moiety that has been shown to effectively translocate therapeutic compounds across the blood-brain barrier in order to delivery these agents to the brain. This procedure is described in detail in EP 2308514, the teachings of which are incorporated herein by reference.

[0161] A suitable dose of a pharmaceutical composition of the invention may vary depending on pharmaceutical formulation methods, administration methods, the patient's age, body weight, sex, severity of diseases, diet, administration time, administration route, an excretion rate and sensitivity for a used pharmaceutical composition. For instance, a pharmaceutical composition of the invention may be administered in a daily dose in the range of 0.001-100 mg/kg (body weight). The dose may be administered one or more times (e.g., 2-10 times) per day, week, month, or year to a patient (e.g., a human patient) in need thereof.

[0162] According to conventional techniques known to those skilled in the art, the pharmaceutical composition may be formulated with a pharmaceutically acceptable carrier and/or vehicle as described above, and in any one of several different forms, including a unit dose form and a multi-dose form. The composition may be formulated in oil or aqueous media, as a resuspension or emulsion, extract, powder, granule, tablet, or capsule, and/or may further comprise a dispersant or stabilizer.

[0163] Water-Forming NADH or NADPH Oxidases as a Research Tool for Analyzing Respiratory Chain Activity

[0164] In addition to the therapeutic applications described above, the water-forming NADH or NADPH oxidases described above (for instance, a water-forming NADH oxidase having the amino acid sequence of any one of SEQ ID NOs: 1-273, such as a water-forming NADH oxidase having the amino acid sequence of any one of SEQ ID NOs: 1-5, or a water-forming NADPH oxidase having the amino acid sequence of SEQ ID NO: 329 or 330) can be used as a research tool for understanding the molecular biology that underlies human disease, e.g., diseases and conditions caused by defects in the mitochondrial respiratory chain. One of the longstanding challenges to analyzing mitochondrial respiratory chain activity stems from the dual functions that the complexes of the chain perform. A deficiency in one or more components of the respiratory chain can cause a reduction in ATP production, the principle source of energy for cellular metabolism, and a halt in NAD⁺ regeneration, which is chiefly responsible for vital oxidative processes, such as nucleotide biosynthesis and glucose catabolism. Water-forming NADH or NADPH oxidases from lower-order organisms and variants thereof (e.g., as described herein) provide a means for studying the activity of a mammalian cell that exhibits diminished ATP production due to a defective mitochondrial respiratory chain but that is capable of regenerating NAD⁺. This invention therefore provides tools for studying mitochondrial activity, e.g., in cells, animal models, and in patients suffering from diseases associated with respiratory chain deficiencies, in order to more fully understand the molecular etiology that underlies mitochondrial diseases and conditions.

[0165] In order to study the effect of water-forming NADH or NADPH oxidases on a mammalian cell, a target mammalian cell can be engineered to express one or more of these enzymes using any of the gene expression techniques discussed above. Alternatively, a water-forming NADH or NADPH oxidase can be delivered into a mammalian cell directly. Exemplary tools for translocating these proteins across the mammalian cell membrane include the encapsulation of the protein into a liposome, nanoparticle, or nanosphere, as described above. Additionally, water-forming NADH or NADPH oxidases can be modified according to a variety of methods in order to append molecules that aid in the detection, visualization, purification, or organelle-specific delivery of these enzymes. These modifications are disclosed in detail in the sections that follow.

[0166] Conjugates and Fusion Proteins Containing Water-Forming NADH Oxidases

[0167] In order to analyze the activity of water-forming NADH or NADPH oxidases (for instance, a water-forming NADH oxidase having the amino acid sequence of any one of SEQ ID NOs: 1-273 and variants thereof, such as a water-forming NADH oxidase having the amino acid sequence of any one of SEQ ID NOs: 1-5, or a water-forming NADPH oxidase having the amino acid sequence of SEQ ID NO: 329 or 330 and variants thereof) in a mammalian system, it may be desirable to conjugate these enzymes to other molecules in order to form conjugates or fusion proteins. Water-forming NADH or NADPH oxidases can be conjugated to other molecules at either the N-terminus or C-terminus of the enzyme using any one of a variety of established conjugation strategies that are well-known in the art. Examples of pairs of reactive functional groups that can be used to covalently tether a water-forming NADH or NADPH oxidase to another molecule include those previously described, such as thiol pairs, carboxylic acids and amino groups, ketones and amino groups, aldehydes and amino groups, thiols and alpha, beta-unsaturated moieties (such as maleimides or dehydroalanine), thiols and alpha-halo amides, carboxylic acids and hydrazides, aldehydes and hydrazides, and ketones and hydrazides.

[0168] Water-forming NADH or NADPH oxidases (for instance, a water-forming NADH oxidase having the amino acid sequence of any one of SEQ ID NOs: 1-273 and variants thereof, such as a water-forming NADH oxidase having the amino acid sequence of any one of SEQ ID NOs: 1-5, or a water-forming NADPH oxidase having the amino acid sequence of SEQ ID NO: 329 or 330 and variants thereof) can be covalently appended directly to another molecule by a chemical conjugation as described. Alternatively, fusion proteins containing water-forming NADH or NADPH oxidases can be expressed recombinantly from a cell (e.g., a mammalian cell). This can be accomplished, for example, by incorporating a polynucleotide encoding the fusion protein into the nuclear genome of a cell using genome editing techniques, such as those described herein or known in the art. Optionally, water-forming NADH or NADPH oxidases can be joined to a second molecule indirectly by forming a covalent bond between the oxidase and a linker. This linker can then be subsequently conjugated to another molecule, or the linker can be conjugated to another molecule prior to ligation to the water-forming NADH or NADPH oxidase. Examples of linkers that can be used for the formation of a conjugate include those previously described, such as polypeptide linkers (e.g., those that contain naturally occurring or non-naturally occurring amino acids). In certain cases, it may be desirable to include D-amino acids in the linker, as these residues are not present in naturally-occurring proteins and are thus more resistant to degradation by endogenous proteases. Fusion proteins containing polypeptide linkers can be made using chemical synthesis techniques, such as those described herein, or through recombinant expression of a polynucleotide encoding the fusion protein in a cell (e.g., a mammalian cell). Linkers can be prepared using a variety of strategies that are well known in the art, and depending on the reactive components of the linker, can be cleaved by enzymatic hydrolysis, photolysis, hydrolysis under acidic conditions, hydrolysis under basic conditions, oxidation, disulfide reduction, nucleophilic cleavage, or organometallic cleavage (Leriche, et al., Bioorg. Med. Chem., 20:571-582, 2012).

[0169] In certain cases, water-forming NADH or NADPH oxidases (for instance, a water-forming NADH oxidase having the amino acid sequence of any one of SEQ ID NOs: 1-273 and variants thereof, such as a water-forming NADH oxidase having the amino acid sequence of any one of SEQ ID NOs: 1-5, or a water-forming NADPH oxidase having the amino acid sequence of SEQ ID NO: 329 or 330 and variants thereof) may be conjugated to another molecule (e.g., an epitope tag) for the purpose of purification or detection. Examples of such molecules that are useful in protein purification include those that present structural epitopes capable of being recognized by a second molecule. This is a common strategy that is employed in protein purification by affinity chromatography, in which a molecule is immobilized on a solid support and exposed to a heterogeneous mixture containing a target protein conjugated to a molecule capable of binding the immobilized compound. Examples of epitope tag molecules that can be conjugated to water-forming NADH or NADPH oxidases for the purposes of molecular recognition include, without limitation, maltose-binding protein, glutathione-S-transferase, a poly-histidine tag, a FLAG-tag, a myc-tag, human influenza hemagglutinin (HA) tag, biotin, streptavidin. Conjugates containing the epitopes presented by these molecules are capable of being recognized by such complementary molecules as maltose, glutathione, a nickel-containing complex, an anti-FLAG antibody, an anti-myc antibody, an anti-HA antibody, streptavidin, or biotin, respectively. For example, one can purify a water-forming NADH oxidase for use in the compositions and methods of the invention that has been conjugated to an epitope tag from a complex mixture of other proteins and biomolecules (e.g., DNA, RNA, carboyhydrates, phospholipids, etc) by treating the mixture with a solid phase resin containing an complementary molecule that can selectively recognize and bind the epitope tag of the water-forming NADH or NADPH oxidase. Examples of solid phase resins include agarose beads, which are compatible with purifications in aqueous solution.

[0170] Water-forming NADH or NADPH oxidases (for instance, a water-forming NADH oxidase having the amino acid sequence of any one of SEQ ID NOs: 1-273 and variants thereof, such as a water-forming NADH oxidase having the amino acid sequence of any one of SEQ ID NOs: 1-5, or a water-forming NADPH oxidase having the amino acid sequence of SEQ ID NO: 329 or 330 and variants thereof) can additionally be covalently conjugated to molecules that localize to a particular sub-cellular location, such as a specific organelle. Examples of organelles to which the water-forming NADH or NADPH oxidase can be targeted include the mitochondria, nucleus, golgi, endoplasmic reticulum, lysosome, peroxisome, and adiposome. In order to achieve targeting of a water-forming NADH or NADPH oxidase to the mitochondria, it is known in the art that one can covalently bind the oxidase to a mitochondrial targeting sequence (MTS) derived from any mitochondrial protein that is produced outside of the mitochondria. Prediction of the MTS from a given protein is routine in the art, and methods describing the prediction of such sequences are described in Claros, et al., Eur. J. Biochem., 241:779-786, 1996, the teachings of which are incorporated herein by reference. Additional examples of mitochondrial targeting sequences that can be conjugated to a water-forming NADH or NADPH oxidase include those provided in SEQ ID NOs: 298-315, described above. Additionally, water-forming NADH or NADPH oxidases can be covalently tethered to nuclear localization sequences (NLSs) in order to localize these enzymes to the nucleus of a mammalian cell. Identification of NLSs from known eukaryotic proteins that are naturally transported to the nucleus has been described Cokol, et al., EMBO Rep., 1:411-415, 2000, the teachings of which are incorporated herein by reference.

[0171] It may be desirable to direct a water-forming NADH or NADPH oxidase for use in the compositions and methods of the invention (for instance, a water-forming NADH oxidase having the amino acid sequence of any one of SEQ ID NOs: 1-273 and variants thereof, such as a water-forming NADH oxidase having the amino acid sequence of any one of SEQ ID NOs: 1-5, or a water-forming NADPH oxidase having the amino acid sequence of SEQ ID NO: 329 or 330 and variants thereof) to a particular cellular location in order to study the effects of the enzyme on biochemical pathways that occur exclusively in a specific organelle. For example, one can conjugate a water-forming NADH or NADPH oxidase for use in the compositions and methods of the invention to a MTS peptide and subsequently expose this conjugate to mammalian cells that exhibit a defective mitochondrial respiratory chain. Alternatively, the conjugate containing the water-forming NADH or NADPH oxidase and the MTS sequence can be expressed in a mammalian cell using any of the gene expression techniques described herein. Mammalian cells that have been treated with the conjugate or that express the conjugate can then be analyzed to determine the effect of the enzyme on mitochondrial activity. For instance, one can determine the effect of the enzyme on cell proliferation by monitoring such metrics as cell viability, the distribution of cells across the G1, S, G2, and M stages of the cell cycle, or cell morphology according to established protocols known in the art.

[0172] In order to improve the bioavailability of water-forming NADH or NADPH oxidases (for instance, a water-forming NADH oxidase having the amino acid sequence of any one of SEQ ID NOs: 1-273 and variants thereof, such as a water-forming NADH oxidase having the amino acid sequence of any one of SEQ ID NOs: 1-5, or a water-forming NADPH oxidase having the amino acid sequence of SEQ ID NO: 329 or 330 and variants thereof), these enzymes can be conjugated to molecules that facilitate the transport of protein therapeutics across the cell membrane. Examples of such molecules include cell-penetrating peptides (CPPs), such as those described above. One can conjugate a water-forming NADH or NADPH oxidase to a CPP by covalently joining a reactive functional group of the enzyme (such as the N-terminal amine or C-terminal carboxylate) to an appropriate chemical moiety of the CPP molecule. This can be accomplished using established bond forming procedures known in the art. One can expose conjugates containing a water-forming NADH or NADPH oxidase and a CPP to mammalian cells in order to enhance the uptake of the enzymes by cells in vitro. Such conjugates can be used for studying the effect of water-forming NADH or NADPH oxidases on mammalian cells under various conditions, such as at a reduced temperature or cell starvation. Many CPPs are capable of penetrating the cell membrane in an energy-independent fashion. As such, a water-forming NADH or NADPH oxidase conjugated to a CPP can be exposed to cultured mammalian cells at low temperatures (such as 2-5° C.) or under conditions in which concentrations of nutrients in the culture media are diminished so as to analyze the effect of water-forming NADH or NADPH oxidases on metabolic activity under these conditions. The activity of such cells can be analyzed by any of a variety of methods. For instance, one can determine the concentration of intermediates in the citric acid cycle or glycolysis in order to understand the effect of these enzymes on glucose metabolism under such conditions. Alternatively, one can use quantitative polymerase chain reaction-based (PCR) techniques known in the art to evaluate the effects of water-forming NADH or NADPH oxidases on gene expression levels under these conditions. One can additionally probe the viability of cells after treatment with water-forming NADH or NADPH oxidases conjugated to CPPs by measuring the quantity of live cells in a particular culture using established methods known in the art, including analysis of cell count by microscopy via trypan blue dye exclusion.

[0173] In specific studies, it can be useful to covalently append a water-forming NADH or NADPH oxidase (for instance, a water-forming NADH oxidase having the amino acid sequence of any one of SEQ ID NOs: 1-273 and variants thereof, such as a water-forming NADH oxidase having the amino acid sequence of any one of SEQ ID NOs: 1-5, or a water-forming NADPH oxidase having the amino acid sequence of SEQ ID NO: 329 or 330 and variants thereof) to a fluorescent molecule for the purposes of detection of the NADH or NADPH oxidase by fluorimetry and/or by direct visualization using fluorescence microscopy. Exemplary fluorescent molecules that can be conjugated to these oxidases include green fluorescent protein, cyan fluorescent protein, yellow fluorescent protein, red fluorescent protein, phycoerythrin, allophycocyanin, hoescht, 4′,6-diamidino-2-phenylindole (DAPI), propidium iodide, fluorescein, coumarin, rhodamine, tetramethylrhoadmine, and cyanine. Additional examples of fluorescent molecules suitable for conjugation to the NADH or NADPH oxidases of the invention are well-known in the art and have been described in detail in, e.g., U.S. Pat. Nos. 7,417,131 and 7,413,874, each of which is incorporated by reference herein.

[0174] Water-forming NADH or NADPH oxidases containing a fluorescent molecule are particularly useful for monitoring the sub-cellular localization of these enzymes. For instance, one can expose cultured mammalian cells to water-forming NADH or NADPH oxidases for use in the compositions and methods of the invention that have been covalently conjugated to a fluorescent molecule and subsequently analyze these cells using conventional fluorescent microscopy techniques known in the art. Confocal fluorescent microscopy is a particularly powerful method for determining sub-cellular localization of water-forming NADH or NADPH oxidases, as individual planes of a mammalian cell can be analyzed in order to distinguish enzymes that are located in a cell's interior from those that are bound to the external face of the cell membrane. Additionally, cells can be treated with water-forming NADH or NADPH oxidases conjugated to a fluorescent molecule that emits visible light of a particular wavelength (e.g., fluorescein, which fluoresces at about 535 nm) and an additional fluorescent molecule that is known to localize to a particular organelle and that fluoresces at a different wavelength (e.g., MITOTRACKER® Red, Life Technologies, which fluoresces at about 599 nm). The resulting emission patterns can be visualized by confocal fluorescence microscopy and the images from these two wavelengths can be merged in order to reveal information regarding the location of the water-forming NADH or NADPH oxidase in the cell with respect to other organelles.

[0175] Bioluminescent proteins can also be incorporated into a fusion protein for the purposes of detection and visualization of a water-forming NADH or NADPH oxidase (for instance, a water-forming NADH oxidase having the amino acid sequence of any one of SEQ ID NOs: 1-273 and variants thereof, such as a water-forming NADH oxidase having the amino acid sequence of any one of SEQ ID NOs: 1-5, or a water-forming NADPH oxidase having the amino acid sequence of SEQ ID NO: 329 or 330 and variants thereof). Bioluminescent proteins, such as Luciferase and aequorin, emit light as part of a chemical reaction with a substrate (e.g., luciferin and coelenterazine). Exemplary bioluminescent proteins suitable for use as a diagnostic sequence and methods for their use are described in, e.g., U.S. Pat. Nos. 5,292,658, 5,670,356, 6,171,809, and 7,183,092, each of which is herein incorporated by reference. Water-forming NADH or NADPH oxidases labeled with bioluminescent proteins are a useful tool for the detection of these enzymes following an in vitro assay. For instance, the presence of a water-forming NADH or NADPH oxidase that has been conjugated to a bioluminescent protein can be detected among a complex mixture of additional proteins by separating the components of the mixture using gel electrophoresis methods known in the art (e.g., native gel analysis) and subsequently transferring the separated proteins to a membrane in order to perform a Western blot. Detection of the water-forming NADH or NADPH oxidase among the mixture of other proteins can be achieved by treating the membrane with an appropriate Luciferase substrate and subsequently visualizing the mixture of proteins on film using established protocols.

[0176] The enzymes for use in the compositions and methods of the invention can also be conjugated to a molecule comprising a radioactive nucleus, such that the NADH or NADPH oxidase (for instance, a water-forming NADH oxidase having the amino acid sequence of any one of SEQ ID NOs: 1-273 and variants thereof, such as a water-forming NADH oxidase having the amino acid sequence of any one of SEQ ID NOs: 1-5, or a water-forming NADPH oxidase having the amino acid sequence of SEQ ID NO: 329 or 330 and variants thereof) can be detected by analyzing the radioactive emission pattern of the nucleus. Alternatively, the water-forming NADH or NADPH oxidase can be modified directly by incorporating a radioactive nucleus within the enzyme during the preparation of these proteins. Radioactive isotopes of methionine (³⁵S), nitrogen (¹⁵N), or carbon (¹³C) can be incorporated in these oxidases by, e.g., culturing bacteria in media that has been supplemented with nutrients containing these isotopes. Optionally, tyrosine derivatives containing a radioactive halogen can be incorporated into a water-forming NADH or NADPH oxidase by, e.g., culturing bacterial cells in media supplemented with radiolabeled tyrosine. It has been shown that tyrosine functionalized with a radioactive halogen at the C2 position of the phenol system are rapidly incorporated into elongating polypeptide chains using the endogenous translation enzymes in vivo (U.S. Pat. No. 4,925,651, the teachings of which are incorporated herein by reference). The halogens include fluorine, chlorine, bromine, iodine, and astatine. Additionally, water-forming NADH or NADPH oxidases can be modified following isolation and purification from cell culture by functionalizing these enzymes with a radioactive isotope. The halogens represent a class of isotopes that can be readily incorporated into a purified protein by aromatic substitution at tyrosine or tryptophan, e.g., via reaction of one or more of these residues with an electrophilic halogen species. Examples of radioactive halogen isotopes include ¹⁸F, ⁷⁵Br, ⁷⁷Br, ¹²²I, ¹²³I, ¹²⁴I, ¹²⁵I, ¹²⁹I, ¹³¹I, or ²¹¹At.

[0177] Another alternative strategy for the incorporation of a radioactive isotope is the covalent attachment of a chelating group to the water-forming NADH or NADPH oxidase (for instance, a water-forming NADH oxidase having the amino acid sequence of any one of SEQ ID NOs: 1-273 and variants thereof, such as a water-forming NADH oxidase having the amino acid sequence of any one of SEQ ID NOs: 1-5, or a water-forming NADPH oxidase having the amino acid sequence of SEQ ID NO: 329 or 330 and variants thereof). Chelating groups can be covalently appended to a water-forming NADH or NADPH oxidase by attachment to a reactive functional group, such as a thiol, amino group, alcohol, or carboxylic acid. The chelating groups can then be modified to contain any of a variety of metallic radioisotopes, including, without limitation, such radioactive nuclides as ¹²⁵I, ⁶⁷Ga, ¹¹¹In, ⁹⁹Tc, ¹⁶⁹Yb, ¹⁸⁶Re, ¹²³I, ¹²⁴I, ¹²⁵I, ¹³¹I, ^{99m}Tc, ¹¹¹In, ⁶⁴Cu, ⁶⁷Cu, ¹⁸⁶Re, ¹⁸⁸Re, ¹⁷⁷Lu, ⁹⁰Y, ⁷⁷As, ⁷²As, ⁸⁶Y, ⁸⁹Zr, ²¹¹At, ²¹²Bi, ²¹³Bi, or ²²⁵Ac.

[0178] In certain cases, it may be desirable to covalently conjugate a chelating group capable of binding a metal ion from heavy elements or rare earth ions, such as Gd³⁺, Fe³⁺, Mn³⁺, or Cr²⁺, to a water-forming NADH or NADPH oxidase (for instance, a water-forming NADH oxidase having the amino acid sequence of any one of SEQ ID NOs: 1-273 and variants thereof, such as a water-forming NADH oxidase having the amino acid sequence of any one of SEQ ID NOs: 1-5, or a water-forming NADPH oxidase having the amino acid sequence of SEQ ID NO: 329 or 330 and variants thereof). Conjugates containing chelating groups that are coordinated to such paramagnetic metals are useful in MRI imaging applications. Paramagnetic metals include, but are not limited to, chromium (III), manganese (II), iron (II), iron (III), cobalt (II), nickel (II), copper (II), praseodymium (III), neodymium (III), samarium (III), gadolinium (III), terbium (III), dysprosium (III), holmium (III), erbium (III), and ytterbium (III). In this way, water-forming NADH or NADPH oxidases can be detected by MRI spectroscopy. This represents a useful tool for analyzing the absorption and distribution of these enzymes, for example, in pre-clinical assays in animal models of mitochondrial disease (Wallace, Methods Mol. Biol., 197:3-54, 2002). For instance, one can treat a subject (e.g., a mouse model of mitochondrial disease) with a water-forming NADH or NADPH oxidase conjugated to a molecule containing a chelating group that is bound to a paramagnetic ion. The mouse can subsequently be analyzed by MRI in order to determine the distribution of the enzyme within the mouse. These studies can be performed in order to reveal information pertaining to the primary sites of metabolism of these enzymes in vivo, and the results of these experiments can inform the design of water-forming NADH or NADPH oxidases that have been modified in order to improve metabolic stability.

[0179] Water-forming NADH or NADPH oxidases for use in the compositions and methods of the invention (for instance, a water-forming NADH oxidase having the amino acid sequence of any one of SEQ ID NOs: 1-273 and variants thereof, such as a water-forming NADH oxidase having the amino acid sequence of any one of SEQ ID NOs: 1-5, or a water-forming NADPH oxidase having the amino acid sequence of SEQ ID NO: 329 or 330 and variants thereof) can also be conjugated to a cytotoxic agent in order to study the pathophysiology of a cell proliferation disease in mammalian cells that also exhibit a mitochondrial defect. For example, a water-forming NADH or NADPH oxidase can be covalently joined to any of the previously described cytotoxic agents, and the resulting conjugate can subsequently be administered to cultured mammalian cells that display diminished respiratory chain activity and have escaped cell cycle controls. In this way, the effect of the conjugate on such cells can be monitored by determining the viability of the cultured cells after exposure to the conjugate. Alternatively, one can determine the concentration of metabolites that are produced by these cells in response to the conjugate, as an increase or decrease in the content of certain biomolecules can provide insight into the biochemical pathways that are perturbed by introduction of the conjugate. Exemplary metabolites that can be analyzed in response in response to treatment of cultured mammalian cells with conjugates containing water-forming NADH or NADPH oxidases include NAD⁺, NADP⁺, NADH, NADPH, FAD, FADH₂, PDH, pyruvate, lactate, ethanol, glucose, oxaloacetate, fumarate, succinate, and alpha-ketoglutarate, among others. This analysis would enable one to correlate particular water-forming NADH or NADPH oxidase-containing conjugates with distinct pathways that may be aberrantly regulated in certain disease states.

[0180] Kits Containing Water-Forming NADH or NADPH Oxidases

[0181] This invention also includes kits that contain water-forming NADH or NADPH oxidases (for instance, a water-forming NADH oxidase having the amino acid sequence of any one of SEQ ID NOs: 1-273 and variants thereof, such as a water-forming NADH oxidase having the amino acid sequence of any one of SEQ ID NOs: 1-5, or a water-forming NADPH oxidase having the amino acid sequence of SEQ ID NO: 329 or 330 and variants thereof). The kits provided herein may contain any of the water-forming NADH or NADPH oxidases described above, as well as any of the polynucleotides encoding these enzymes, vectors encoding these polynucleotides, or mammalian cells engineered to express these enzymes. A kit of this invention may include reagents that can be used to produce the compositions of the invention (e.g., water-forming NADH or NADPH oxidases, fusion proteins containing water-forming NADH or NADPH oxidases, polynucleotides encoding water-forming NADH or NADPH oxidases, vectors containing these polynucleotides, mammalian cells that express water-forming NADH or NADPH oxidases, etc). Optionally, kits of the invention may include reagents that can induce the expression of water-forming NADH or NADPH oxidases within mammalian cells, such as doxycycline or tetracycline. In other cases, a kit of the invention contains a compound capable of binding and detecting a fusion protein that contains a water-forming NADH or NADPH oxidase and an epitope tag. For instance, in such cases a kit of the invention may contain maltose, glutathione, a nickel-containing complex, an anti-FLAG antibody, an anti-myc antibody, an anti-HA antibody, biotin, or streptavidin.

[0182] Kits of the invention may also include reagents that are capable of detecting a water-forming NADH or NADPH oxidase (for instance, a water-forming NADH oxidase having the amino acid sequence of any one of SEQ ID NOs: 1-273 and variants thereof, such as a water-forming NADH oxidase having the amino acid sequence of any one of SEQ ID NOs: 1-5, or a water-forming NADPH oxidase having the amino acid sequence of SEQ ID NO: 329 or 330 and variants thereof). Examples of such reagents include primary antibodies that selectively recognize and bind particular structural epitopes of a water-forming NADH or NADPH oxidase. These reagents can be used for the detection and visualization of a water-forming NADH or NADPH oxidase, for instance, by performing an immunoblot according to procedures known in the art. Kits of the invention may also contain primary antibodies that selectively recognize a water-forming NADH or NADPH oxidase and that are conjugated to a fluorescent molecule. These antibody-fluorophore conjugates provide a tool for analyzing the localization of water-forming NADH or NADPH oxidases, e.g., in a particular tissue or cultured mammalian cell using established immunofluorescence techniques. In certain cases, kits of the invention may include additional fluorescent compounds that exhibit known sub-cellular localization patterns. These reagents can be used in combination with an antibody-fluorophore conjugate, such as those described above, in order to identify the specific organelles and cellular structures to which a water-forming NADH or NADPH oxidase localizes.

[0183] In other cases, a kit of the invention may also contain reagents useful for analyzing an effect of water-forming NADH or NADPH oxidase activity in a mammalian cell or within a specific organelle within said mammalian cell. The effect that can be studied using such a kit can be a change in the ratio of NAD⁺ to NADH or NADPH, a change in the ratio of lactate to pyruvate, a change in the rate of gluconeogenesis, or a change in the phosphorylation state of PDH in a mammalian cell or in a specific organelle within a mammalian cell.

[0184] Kits of the invention may also contain a reagent that can be used for the analysis of a metabolite or other biomolecule in a mammalian cell following treatment with a water-forming NADH or NADPH oxidase of the invention (for instance, a water-forming NADH oxidase having the amino acid sequence of any one of SEQ ID NOs: 1-273 and variants thereof, such as a water-forming NADH oxidase having the amino acid sequence of any one of SEQ ID NOs: 1-5, or a water-forming NADPH oxidase having the amino acid sequence of SEQ ID NO: 329 or 330 and variants thereof). For instance, a kit may include a primary antibody that selectively recognizes an endogenous protein within a mammalian cell, such as, e.g., a protein involved in cell proliferation, gene expression, protein translation, cell cycle control, glucose metabolism, nucleotide biosynthesis, or other biochemical pathways. The components of this kit can be used to determine the effect of a water-forming NADH or NADPH oxidase on the intracellular concentrations of these molecules. For instance, using the kit, one can expose a mammalian cell exhibiting deficient respiratory chain activity to a water-forming NADH or NADPH oxidase and subsequently monitor the levels of other cellular proteins by performing a Western blot according to established protocols known in the art. Antibodies provided in such a kit may additionally include secondary antibodies that recognize the previously described primary antibody and that is in turn conjugated to an additional molecule for the purposes of visualization. Examples of secondary antibodies useful for the detection and visualization of primary antibodies include those that are conjugated to enzymes that generate visible light. This light can be due to luminescence of a product of the chemical reaction catalyzed by such an enzyme. Preferred secondary antibodies include those conjugated to such enzymes as horseradish peroxidase, Luciferase, and others known in the art.

[0185] A kit of the invention may also include a reagent that is capable of detecting the enzymatic activity of a water-forming NADH or NADPH oxidase (for instance, a water-forming NADH oxidase having the amino acid sequence of any one of SEQ ID NOs: 1-273 and variants thereof, such as a water-forming NADH oxidase having the amino acid sequence of any one of SEQ ID NOs: 1-5, or a water-forming NADPH oxidase having the amino acid sequence of SEQ ID NO: 329 or 330 and variants thereof) by detecting a product of the chemical reaction catalyzed by this enzyme. Such a kit can include a reagent capable of detecting NAD⁺ or NADP⁺. This can be achieved by providing a substrate, such as ethanol, that can be oxidized by NAD⁺ or NADP⁺, and an enzyme capable of catalyzing this oxidation, such as alcohol dehydrogenase. This provides a means of chemically detecting the level of NAD⁺ or NADP⁺ in a biological sample, since the oxidation of ethanol to acetaldehyde requires a minimum amount of NAD⁺ or NADP⁺ present in the sample and increases in proportion to the concentration of NAD⁺ or NADP⁺ available. The kit can provide another reagent capable of being reduced by the NADH or NADPH that is generated by this process, as well as an enzyme capable of reducing this reagent to one that can be detected visually or spectrophotometrically by monitoring the absorption of a specific wavelength of visible light by the solution. Examples of a compatible substrate that can be reduced by NADH or NADPH include a tetrazolium salt, such as tetrazolium chloride. A diaphorase enzyme catalyzes the reduction of tetrazolium salts to formazan, an aromatic, highly-colored dye that is readily detectable by spectrophotometry.

[0186] A kit of the invention may also contain a vector containing a polynucleotide that encodes a water-forming NADH or NADPH oxidase (for instance, a water-forming NADH oxidase having the amino acid sequence of any one of SEQ ID NOs: 1-273 and variants thereof, such as a water-forming NADH oxidase having the amino acid sequence of any one of SEQ ID NOs: 1-5, or a water-forming NADPH oxidase having the amino acid sequence of SEQ ID NO: 329 or 330 and variants thereof), such as any of the vectors described herein (e.g., a viral vector, such as a lentiviral vector, adenoviral vector, or AAV vector, among others). Alternatively, a kit may include mammalian cells that have been genetically altered to express water-forming NADH or NADPH oxidases from the nuclear genome of the cell. Such a kit may also contain instructions describing how expression of the water-forming NADH or NADPH oxidase gene can be induced, and may additionally include reagents (such as, e.g., doxycycline or tetracycline) that can be used to promote the transcription of these genes.

[0187] Kits of the invention may also contain reagents that can be conjugated to a water-forming NADH or NADPH oxidase (for instance, a water-forming NADH oxidase having the amino acid sequence of any one of SEQ ID NOs: 1-273 and variants thereof, such as a water-forming NADH oxidase having the amino acid sequence of any one of SEQ ID NOs: 1-5, or a water-forming NADPH oxidase having the amino acid sequence of SEQ ID NO: 329 or 330 and variants thereof), including those previously described (e.g., a cell-penetrating peptide, an organelle-targeting molecule, a fluorescent molecule, a bioluminescent molecule, a molecule containing a radioactive isotope, a molecule containing a chelating group bound to a paramagnetic ion, a cytotoxic agent, etc). These kits may additionally contain instructions for how the conjugation of a water-forming NADH or NADPH oxidase of the invention to a second molecule, such as those described above, can be achieved.

[0188] Other kits of the invention may include tools for engineering a mammalian cell (e.g., a human cell) so as to express a water-forming NADH or NADPH oxidase (for instance, a water-forming NADH oxidase having the amino acid sequence of any one of SEQ ID NOs: 1-273 and variants thereof, such as a water-forming NADH oxidase having the amino acid sequence of any one of SEQ ID NOs: 1-5, or a water-forming NADPH oxidase having the amino acid sequence of SEQ ID NO: 329 or 330 and variants thereof) from the nuclear genome of the cell. For example, a kit may contain mammalian cells stored in an appropriate media and optionally frozen according to methods known in the art. The kit may also provide a vector containing a polynucleotide that encodes a nuclease (e.g., such as the CRISPER/Cas, zinc finger nuclease, TALEN, ARCUS™ nucleases described herein) as well as reagents for expressing the nuclease in the cell. The kit can additionally provide tools for modifying the polynucleotide that encodes the nuclease to enable one to alter the DNA sequence of the nuclease in order to direct the cleavage of a specific target DNA sequence of interest. Examples of such tools include primers for the amplification and site-directed mutagenesis of the polynucleotide encoding the nuclease of interest. The kit may also include restriction enzymes that can be used to selectively excise the nuclease-encoding polynucleotide from the vector and subsequently re-introduce the modified polynucleotide back into the vector once the user has modified the gene. Such a kit may also include a DNA ligase that can be used to catalyze the formation of covalent phosphodiester linkages between the modified nuclease-encoding polynucleotide and the target vector.

[0189] The kit may also provide a polynucleotide encoding a water-forming NADH or NADPH oxidase (for instance, a water-forming NADH oxidase having the amino acid sequence of any one of SEQ ID NOs: 1-273 and variants thereof, such as a water-forming NADH oxidase having the amino acid sequence of any one of SEQ ID NOs: 1-5, or a water-forming NADPH oxidase having the amino acid sequence of SEQ ID NO: 329 or 330 and variants thereof), as well as a package insert describing the methods one can use to selectively cleave a particular DNA sequence in the genome of the cell in order to incorporate the polynucleotide encoding a water-forming NADH or NADPH oxidase into the genome at this site. Optionally, the kit may provide a polynucleotide encoding a fusion protein that contains a water-forming NADH or NADPH oxidase and an additional polypeptide, such as, e.g., those described herein.

### EXAMPLES

[0190] The following examples are put forth so as to provide those of ordinary skill in the art with a description of how the compositions and methods claimed herein are performed, made, and evaluated, and are intended to be purely exemplary for use in the compositions and methods of the invention and are not intended to limit the scope of what the inventors regard as their invention.

### Example 1. Materials and Methods

[0191] Cell Culture Reagents

[0192] Oligomycin A, antimycin A, doxycycline, nicotinamide mononucleotide (PMN), FAD, NAD⁺, NADH, NADP⁺, NADPH, AMP, ADP, ATP, malate, sodium dithionite and oxaloacetate were purchased from Sigma. Piericidin A was from Santa Cruz Biotechnlogy. PJ34 was from Tocris. Hoechst 33345 was from Life Technologies.

[0193] Formulations of cell culture media used in this study are listed in Table 3. HeLa cells were purchased from ATCC (CCL-2) and were cultured in Dulbecco's modified Eagle's medium (DMEM (US Biological, D9800), 3.7 g/L NaHCO₃, 10% dialyzed FBS (Life Technologies, 26400-044)). HEK293T cells were purchased from ATCC (CRL-11268) and were cultured in DMEM (High glucose DMEM containing NaHCO₃ (Life Technologies, 11995) and 10% FBS (Sigma, F2442)). Lentiviral infected HeLa cells were cultured in DMEM (DMEM (US Biological, D9800), 3.7 g/L NaHCO₃, 10% dialyzed FBS (Life Technologies, 26400-044))±200 μg/ml geneticin (Life Technologies, 10131-035)±1 μg/ml puromycin (Life Technologies, A1113803). All of the experiments were performed in the absence of geneticin and puromycin.

TABLE 3
Formulations of cell culture media

| | DMEM | DMEM | DMEM | DMEM | DMEM |
|---|---|---|---|---|---|
| | US | US | US | Life | Life |
| | Biological | Biological | Biological | Technologies | Technologies |
| | D9800 | D9800-02 | D9802 | 11995 | A14430 |
| | g/L | g/L | g/L | g/L | g/L |
| Inorganic Salts: | | | | | |
| Calcium | 0.265 | 0.265 | 0.265 | 0.200 | 0.200 |
| Chloride•2H2O | | | | CaCl2(anhyd.) | CaCl2(anhyd.) |
| Ferric | 0.0001 | 0.0001 | 0.0001 | 0.0001 | 0.0001 |
| Nitrate•9H2O | | | | | |
| Magnesium | 0.09767 | 0.09767 | 0.09767 | 0.09767 | 0.09767 |
| Sulfate | | | | | |
| Potassium | 0.4 | 0.4 | 0.4 | 0.4 | 0.4 |
| Chloride | | | | | |
| Sodium Chloride | 6.4 | 6.4 | 6.4 | 6.4 | 6.4 |
| Sodium Phosphate | 0.109 | 0.109 | 0.109 | 0.125 NaH2PO4—H2O | 0.125 NaH2PO4—H2O |
| Monobasic | | | | | |
| Sodium Bicarbonate | Absent | Absent | Absent | 3.7 | 3.7 |
| (NaHCO3) | | | | | |
| Amino Acids: | | | | | |
| L-Arginine•HCl | 0.084 | 0.084 | 0.084 | 0.084 | 0.084 |
| L-Cystine•2HCl | 0.0626 | 0.0626 | 0.0626 | 0.063 | 0.063 |
| L-Glutamine | 0.584 | Absent | 0.584 | 0.584 | Absent |
| Glycine | 0.03 | 0.03 | 0.03 | 0.03 | 0.03 |
| L-Histidine•HCl•H2O | 0.042 | 0.042 | 0.042 | 0.042 | 0.042 |
| L-Isoleucine | 0.105 | 0.105 | 0.105 | 0.105 | 0.105 |
| L-Leucine | 0.105 | 0.105 | 0.105 | 0.105 | 0.105 |
| L-Lysine•HCl | 0.146 | 0.146 | 0.146 | 0.146 | 0.146 |
| L-Methionine | 0.03 | 0.03 | 0.03 | 0.03 | 0.03 |
| L-Phenylalanine | 0.066 | 0.066 | 0.066 | 0.066 | 0.066 |
| L-Serine | 0.042 | 0.042 | 0.042 | 0.042 | 0.042 |
| L-Threonine | 0.095 | 0.095 | 0.095 | 0.095 | 0.095 |
| L-Tryptophan | 0.016 | 0.016 | 0.016 | 0.016 | 0.016 |
| L-Tyrosine•2Na•2H2O | 0.10379 | 0.10379 | 0.10379 | 0.104 | 0.104 |
| L-Valine | 0.094 | 0.094 | 0.094 | 0.094 | 0.094 |
| Vitamins: | | | | | |
| Choline Chloride | 0.004 | 0.004 | 0.004 | 0.004 | 0.004 |
| Folic Acid | 0.004 | 0.004 | 0.004 | 0.004 | 0.004 |
| myo-Inositol | 0.0072 | 0.0072 | 0.0072 | 0.0072 | 0.0072 |
| Niacinamide | 0.004 | 0.004 | 0.004 | 0.004 | 0.004 |
| D-Pantothenic | 0.004 | 0.004 | 0.004 | 0.004 | 0.004 |
| Acid, Ca | | | | | |
| Pyridoxal•HCl | 0.004 | 0.004 | 0.004 | 0.004 | 0.004 |
| Riboflavin | 0.0004 | 0.0004 | 0.0004 | 0.0004 | 0.0004 |
| Thiamine•HCl | 0.004 | 0.004 | 0.004 | 0.004 | 0.004 |
| Other: | | | | | |
| D-Glucose | 1 | Absent | 1 | 4.5 | Absent |
| Pyruvic Acid, | 0.11 | 0.11 | Absent | 0.11 | Absent |
| Sodium | | | | | |
| Phenol Red, | 0.0159 | 0.0159 | Absent | 0.015 | Absent |
| Sodium | | | | | |

[0194] Cloning of NOXes into pLVX-TRE3G Vector

[0195] Human codon optimized genes encoding H₂O-forming NADH oxidases (NOXes) from Lactobacillus brevis (SEQ ID NO: 316), Lactococcus lactis (SEQ ID NO: 317), Streptococcus pneumoniae (SEQ ID NO: 318), Streptococcus mutans (SEQ ID NO: 319), and Serpulina hyodysenteriae (SEQ ID NO: 320), flanked by NotI and MluI restriction sites in pUC57 vector, were custom synthesized by GENEWIZ. Above mentioned mitoNOXes constructs also included: (i) mitochondrial targeting sequence (MTS) of subunit IV of human cytochrome c oxidase (23 amino acids long, SEQ ID NO: 298) added upstream of the NOX coding sequence and (ii) a linker sequence with a FLAG-tag added in-frame downstream of the nox gene. Only MTS and the NOX coding regions were codon optimized. After digestion with NotI and MluI, inserts were directly ligated into pLVX-TRE3G vector (Clontech, CA). To remove MTS and produce constructs of untargeted NOXes, corresponding nox genes were amplified using the following primers containing restriction sites NotI and MluI shown in bold: Lactobacillus brevis 5′-TTA ATT GCG GCC GCATGA AGGTCA CCGTGGTCG-3′ (SEQ ID NO: 321); Lactococcus lactis 5′-TTA ATT GCG GCC GCATGA AGATTG TCG TCA TCG-3′ (SEQ ID NO: 322); Streptococcus pneumoniae 5′-TTA ATT GCG GCC GCATGA GCA AGATCGTGGTGG-3′ (SEQ ID NO: 323); Streptococcus mutans 5′-TTA ATT GCG GCC GCATGA GCA AGATCG TGA TCG TC-3′ (SEQ ID NO: 324); Serpulina hyodysenteriae 5′-TTA ATT GCG GCC GCATGA AAGTGA TCG TGA TCG-3′ (SEQ ID NO: 325) and the reverse primer 5′-TTA ATT ACG CGT TTA CTT GTC ATC GTC ATC CTT GT-3′ (SEQ ID NO: 326). After digestion with NotI and MluI PCR products were ligated into pLVX-TRE3G vector (Clontech, CA).

[0196] Cloning of LbNOX into pET30a

[0197] L. brevis nox gene was amplified from the pUC57 vector (containing H. sapiens codon optimized sequence) using the following primers containing restriction sites BamHI and Xhol shown in bold: 5′-TTA ATT GGA TCC ATG AAG GTC ACC GTG GTC GG-3′ (SEQ ID NO: 327) and 5′-TTA ATT CTC GAG TCA CTT GTC ATC GTC ATC C-3′ (SEQ ID NO: 328). After digestion PCR product was ligated into pET30a vector (EMD Millipore). The resulting construct encodes LbNOX with both the N-terminal Hisx6-tag and the C-terminal FLAG-tag.

[0198] Cloning of S. cerevisiae Ndi1 into pLVX-TRE3G Vector

[0199] In the construct ordered from GENEWIZ Ndi1 coding sequence was H. sapiens codon-usage optimized and a coding sequence for a FLAG-tag was inserted right after endogenous MTS cleavage site preceded by Agel restriction site. The insert was cut from pUC57, and directly ligated into pLVX-TRE3G vector (Clonetech, CA) using NotI and EcoRl restriction sites.

[0200] Lentivirus Production

[0201] Half a million HEK293T cells were seeded per well in a 6-well plate (one plate per lentivirus) in 2 ml of DMEM (High glucose DMEM (Life Technologies, 11995), 10% FBS (Sigma, F2442)). Next evening media was replaced with fresh DMEM and cells were transfected with 100 μl of the transfection mixture per well. Transfection mixture contained 3 μl X-TREME™ Gene 9 reagent (Roche, 06365787001), 500 ng psPAX2 (psPAX2 was a gift from Didier Trono, Addgene plasmid #12260), 50 ng pMD2.G (pMD2.G was a gift from Didier Trono, Addgene plasmid #12259), 500 ng pLVX-TRE3G vector of interest (including pLVX-TRE3G-Luc control vector, expressing Luciferase, obtained from Clonetech) and OPTI-MEM® media (Life Technologies, 31985-070) up to 100 μl. To make the transfection mixture, 50 μl solutions of X-treme Gene 9 and DNA mixture were prepared separately and DNA solution was added dropwise to X-treme Gene 9 solution. The mixture was incubated at room temperature for 30 min before adding to cells. Two days after transfection, media was collected, centrifuged at 500×g for 5 min to pellet cells and supernatant was aliquoted and stored at −80° C.

[0202] Adenovirus Production

[0203] Two custom adenoviruses (Adenovirus Type 5 (dE1/E3)) were produced by Vector Biolabs. The same LbNOX and mitoLbNOX nucleotide sequences were used as in the lentiviral pLVX-TRE3G constructs. Adenoviral constructs encode for expression of either LbNOX or mitoLbNOX and eGFP, each gene driven by its own CMV promoter. Adenovirus with eGFP driven by the CMV promoter was used as a control (Vector Biolabs, 1060-HT).

[0204] Generation of Stable Cells Using Lentiviral Infection

[0205] Fifty thousand HeLa cells were seeded in 2 ml of DMEM (DMEM (US Biological, D9800), 3.7 g/L NaHCO₃, 10% dialyzed FBS (Life Technologies, 26400-044)) per well in a 6-well plate. Twenty four hours after seeding, 200 μl of lentivirus was added per well. Twenty four hours postinfection media was exchanged. After additional twenty four hours, media was exchanged to 2 ml of DMEM±200 μg/ml geneticin (Life Technologies, 10131-035)±1 μg/ml puromycin (Life Technologies, A1113803). Stable cells were selected for at least a week before performing experiments and were cultured in the presence of indicated concentrations of antibiotics.

[0206] Oxygen Consumption Rate (OCR) of Cell Lines Overexpressing NOXes and Luciferase

[0207] Oxygen consumption rates (OCR) of HeLa cells expressing 5 bacterial NOXes (untargeted and targeted to mitochondria) and Luciferase under the control of doxycycline (DOX) inducible promoter (TRE3G) were measured with the XF24 Extracellular Flux Analyzer (Seahorse Bioscience, manufactured in 2008). Cells were seeded at 30-40×10³ cells per well in XF24 24-well cell culture microplates in 200 μl of DMEM (DMEM (US Biological, D9800), 3.7 g/L NaHCO₃ and 10% dialyzed FBS (Life Technologies, 26400-044) and were incubated at 37° C. in 5% CO₂ incubator. Media was replaced the next day with 1 ml per well and doxycycline (final concentration −300 ng/ml, prepared in water) or water were added to the corresponding wells to induce protein expression. Twenty four hour later, media was replaced with 950 μL of the assay medium (no pyruvate DMEM (US Biological, D9802), 15.9 mg/L phenol red, 10% dialyzed FBS (Life Technologies, 26400-044) and 25 mM HEPES-KOH, pH 7.4) and plates were introduced into the X24 Extracellular Flux Analyzer for experimental measurements. Each measurement was performed over 4 min after a 2-min mix and a 2-min wait period. Basal measurements were collected 8 times and 4 measurements were collected after injection of oligomycin (final concentration 1 μM), followed by 4 measurements after addition of antimycin A (final concentration 1 μM) from the XF24 ports in 50 μL of the assay medium.

[0208] Antimycin- and Piericidin-Resistant OCR by LbNOX, mitoLbNOX and Luciferase

[0209] Cells were seeded at 30-40×10³ per well in XF24 24-well cell culture microplates in 200 μl of normal growth media (DMEM (US Biological, D9800), 3.7 g/L NaHCO₃ and 10% dialyzed FBS (Life Technologies, 26400-044)) and were incubated at 37° C. in 5% CO₂ incubator. For all experiments the next day media was renewed with 1 ml per well and doxycycline (final concentration −300 ng/ml) or water were added. Twenty four hours later, media was changed to no pyruvate media (no pyruvate DMEM (US Biological, D9802), 15.9 mg/L phenol red, 3.7 g/L NaHCO₃ and 10% dialyzed FBS (Life Technologies, 26400-044)). Two hours later, media was replaced with 950 μL of the assay medium (no pyruvate DMEM (US Biological, D9802), 15.9 mg/L phenol red, 10% dialyzed FBS (Invitrogen, 26400-044) and 25 mM HEPES-KOH, pH 7.4) and OCR was measured. Each measurement was performed over 4 min after a 2-min mix and a 2-min wait period. Basal measurements were collected 8 times and 4 measurements were collected after injection of each drug: antimycin A (final concentration 1 μM) or piericidin (final concentration 1 μM). Three measurements before and after addition of the drug were averaged and normalized by the cell number.

[0210] Expression and Purification of LbNOX

[0211] E. coli BL21 (DE3) cells (Life Technologies, C6010-03), harboring pET30a vector with the L. brevis nox gene were grown at 37° C. in six 2.8-L flasks, each containing 1 L of LB medium supplemented with 50 μg/ml kanamycin to an A600 of 0.4-0.6. At that point, temperature was decreased to 15° C. and cells were grown for additional 2 h. After induction with 0.1 mM isopropyl 1-thio-β-d-galactopyranoside (IPTG), cells were grown for 14-16 h at 15° C. Harvested cells were resuspended in ˜150 ml of lysis buffer (50 mM Na₂HPO₄, pH 8.0, 500 mM NaCl, 20 mM imidazole) containing six protease inhibitor tablets (Roche Applied Science, 05 056 489 001), 60 μl of BENZONASE® nuclease (EMD Millipore, 71205-3), 4 mM phenylmethylsulfonyl fluoride (PMSF) (prepared in ethanol), 100 μM FAD (Sigma, F6625-100MG) and disrupted by sonication on ice (output setting of 50% for 20 min with 30 sec bursts and 59 sec breaks). Following centrifugation, the cell lysate was filtered through 0.4 μm filter and subjected to dilution to ˜600 ml with lysis buffer and loaded onto a 25-ml Nickel SEPHAROSE™ 6 Fast Flow column (GE Healthcare). After washing with 15 column volumes (CV) of lysis buffer, the protein was eluted with a gradient of 20-300 mM imidazole in lysis buffer over 8 CV. Fractions containing LbNOX were pooled and exchanged into 50 mM Na₂HPO₄, pH 7.5 buffer and applied to a 30-ml Source 15Q column equilibrated with 50 mM Na₂HPO₄, pH 7.5, 50 mM NaCl buffer at flow rate of 6 ml/min. SOURCE™ 15Q resin was obtained from GE Healthcare (17-0947-01) and packed into OMNIFIT® glass column (Sigma, 56009-U). After sample was applied, the column was washed with 5 CV of equilibration buffer and eluted with 15 CV gradient 50-300 mM NaCl in 50 mM Na₂HPO₄, pH 7.5 buffer. The ion-exchange chromatography step on SOURCE™ 15Q allows separation of apoLbNOX (LbNOX which is devoid of FAD cofactor) and LbNOX partially loaded with FAD from fully reconstituted LbNOX (holoLbNOX). The fractions from the peak which corresponded to fully reconstituted LbNOX with the highest specific activity (˜550 μmol min⁻¹ mg⁻¹) were pooled, concentrated and loaded onto a 120 ml HiPrep 16/60 SEPHACRYL™ S-400 column (GE Healthcare, 28-9356-04) equilibrated with 50 mM Na₂HPO₄, pH 7.5, 150 mM NaCl buffer at flow rate of 1.2 ml/min. Fractions containing LbNOX were pooled, concentrated, flash-frozen in liquid nitrogen and stored at −80° C. Ion-exchange chromatography and gel-filtration steps were performed on AKTA pure FPLC system (GE Healthcare).

[0212] To remove extra amino acids arising from the N-terminal Hisx6 tag LbNOX sample (0.5-1.5 mg) was incubated with 18-25 U of recombinant enterokinase (EMD Millipore, 69066-3) at 4° C. overnight. After cleavage with enterokinase sample was passed through His GRAVITRAP™ column (GE Healthcare, 11-0033-99), equilibrated with 50 mM Na₂HPO₄, pH 7.5, 150 mM NaCl buffer and the flow-through containing cleaved protein was collected and used in the experiments. This step provides the most active protein with the specific activity ˜750 μmol min⁻¹ mg⁻¹.

[0213] Determination of the Oligomerization State

[0214] The oligomerization state of LbNOX was determined by size-exclusion chromatography. Protein was injected (0.1 ml of 10 mg/ml protein) onto a HiPrep 16/60 SEPHACRYL™ S-400 HR column (GE Healthcare) equilibrated in 50 mM Na₂HPO₄, pH 7.5, 150 mM NaCl buffer. The column was operated at a flow rate of 1.2 ml/min. LbNOX was injected onto the column 6 times, and each size-exclusion standards (GE Healthcare, 28-4038-41) 3 times that included aldolase (158 kDa), conalbumin (75 kDa), ovalbumin (44 kDa) and carbonic anhydrase (29 kDa).

[0215] Enzymatic Assays

[0216] Recombinant LbNOX activity was monitored by following the decrease of the absorbance of NAD(P)H at 340 μM using CARY® 100 spectrophotometer (Agilent, CA). A typical reaction mixture contained 2 μM FAD in 0.5 ml of the assay buffer (50 mM Na₂HPO₄, pH 7.5, 150 mM NaCl) and was incubated for 4 min at 37° C. before NAD(P)H (2-600 μM) and enzyme (0.08-6.8 μg) were added. Extinction coefficient (ε₃₄₀=6.2 mM⁻¹ cm⁻¹) was used to calculate NAD(P)H oxidase activity. Simultaneous monitoring of oxygen consumption and NADH fluorescence was performed using a custom-built fluorimeter. In our setup the REDEYE™ oxygen patch (OceanOptics) was installed in a cuvette and the optical probe was connected to a fluorimeter. Oxygen causes quenching of the REDEYE™ patch fluorescence which allows to monitor the partial pressure of oxygen. In our experiments 0.5 ml of the assay buffer was preincubated at 28° C. before NADH (40-1500 μM) and LbNOX (0.1-2 μg) were added.

[0217] UV-Visible Spectroscopy

[0218] UV-visible spectra can be recorded for water-forming NADH oxidases for use in the compositions and methods of the invention. UV-visible spectra as described in the examples herein were recorded on a CARY® 100 spectrophotometer (Agilent, CA). LbNOX (40-80 μM FAD active sites) in the assay buffer was incubated at 24° C. and (0.3-3 mM) sodium dithionite was added.

[0219] Determination of H₂O₂ Production by LbNOX

[0220] H₂O₂ production was monitored in a continuous assay followed by the increase in absorbance at 570 nm upon resorufin formation (ε₅₇₀=54 mM⁻¹ cm⁻¹). It was shown previously that presence of NADH in the assay mixture results in the oxidation of AMPLEX® Red dye in the HRP-dependent manner and this process is greatly diminished by supplementation of superoxide dismutase (SOD) (Votyakova, et al., Arch. Biochem. Biophys., 431:138, 2004). Therefore in our continuous assay we used SOD to minimize background rate of resorufin production, which is not related to H₂O₂ production by LbNOX. Assay mixture contained 350 μM NADH, 10 μl of HRP (Abcam, ab102500), 10 μl of AMPLEX® Red (Abcam, ab102500), 100 μM D-glucose, 130 U SOD (Sigma, 13697-75 KU) in 0.5 ml of the assay buffer (50 mM Na₂HPO4, pH 7.5, 150 mM NaCl). The reaction was preincubated at 37° C. for 3 min before LbNOX was added (0.15 μg) and subsequently after LbNOX-dependent rate of H₂O₂ production was recorded, 4 U of glucose oxidase (Sigma, G2133-10 KU) was added (FIG. 6). Glucose oxidase was used to validate the assay (FIG. 6). H₂O₂-forming activity of LbNOX was compared to the total NADH oxidase activity which was determined in a parallel experiment when the decrease of NADH absorbance at 340 nm was monitored under identical conditions.

[0221] Enzyme-Monitored Turnover

[0222] The reaction of LbNOX with oxygen was studied by the enzyme-monitored turnover method (Gibson, et al., J. Biol. Chem., 239:3927, 1964; and Tapley, et al., J. Biol. Chem., 282:10263, 2007). Rapid reaction studies were carried out at 4° C. in a SX20 stopped flow instrument (Applied Photophysics, UK) equipped with a diode array detector. To follow the redox state of the FAD cofactor, LbNOX enzyme (1.9, 2.9, 5.6 and 9.18 μM FAD active sites after mixing) was mixed with NADH (2 mM after mixing), both prepared in air-saturated assay buffer (50 mM Na₂HPO₄, pH 7.5, 150 mM NaCl) and absorbance at 455 nm was monitored over time. Solubility of oxygen at 4° C. was calculated from oxygen solubility table at corresponding salinity of the assay buffer which is ˜380 μM. Results represent (n=3) independent experiments. The traces at 455 nm reflect the conversion of oxidized to reduced enzyme forms and are treated as previously described (Gibson, et al., J. Biol. Chem., 239:3927, 1964), where the area under the curve is proportional to the concentration of oxygen which is a limiting substrate under these conditions. From the traces generated at different enzyme concentrations it can be seen that the absorbance at 455 nm drops rapidly to the steady state where the signal remains constant until the rapid drop at the point where oxygen is depleted and the enzyme becomes fully reduced (FIG. 7). This last phase is very abrupt even at 1.9 μM enzyme, demonstrating that concentration of oxygen is significantly higher than the K_{M} for oxygen even during the last turnover. We therefore estimated that apparent K_{M} for O₂ to be less than 2 μM. Based on the enzyme concentration (1.9-9.18 μM) and time it took to consume O₂ (8.12-1.67 sec), apparent k_{cat} can be calculated (FIG. 7).

[0223] Protein Crystallization and Structure Determination

[0224] Crystals of LbNOX were grown by vapor diffusion technique. For the initial screening of crystallization conditions 0.1 μl of protein solution (10 mg/ml LbNOX in 10 mM HEPES, pH 7.5 100 mM NaCl) and 0.1 μl of precipitant solution (MCSG Suite, Microlytic, MA) were mixed using the NanoTransfer NT8 pipetting robot (Formulatrix, MA) and incubated over a 50 μl reservoir in the sitting drop plates. Progress of protein crystallization was monitored with Rock Maker (Formulatrix, MA). Optimal crystals were formed in 20% PEG 3350, 0.2 M NH4Cl at 21° C. For harvesting, crystals were cryoprotected by adding 20% (v/v) of ethylene glycol to the precipitant solution.

[0225] X-ray diffraction data were collected at beamline 8.2.2 at the Advanced Light Source (Berkeley, Calif.). Data collected at λ=1.000 Å were indexed, integrated, and scaled using the software HKL2000 (Otwinowski, et al., Meth. Enzymol., 276:307, 1997). Four molecules of LbNOX in the asymmetric unit of P1 crystal were found by molecular replacement with Phaser-MR program of PHENIX package (Bunkoczi, et al., Acta Crystallogr. Section D, Biological crystallography, 69:2276, 2013; and Adams, et al., Acta Crystallogr. Section D, Biological crystallography, 66:213, 2010) using the structure of H₂O-forming NAD(P)H oxidase from Lactobacillus sanfranciscensis (PDB ID 2CDU) as a model. The structure was refined using Phenix.refine (Adams, et al., Acta Crystallogr. Section D, Biological crystallography, 66:213, 2010) and/or refmac5 in the CCP4 suite (Winn, et al., Acta Crystallogr. Section D, Biological crystallography, 67:235, 2011), and manually using COOT (Emsley et al., Acta Crystallogr. Section D, Biological crystallography, 60:2126, 2004). Oxygen and FAD molecules were added in later rounds of refinement. The final protein model contained all residues except for the N-terminal Hisx6 tag and the C-terminal FLAG tag. All data collection and refinement statistics are summarized in Table 4. Protein figures were generated using PyMOL (Schrodinger, LLC. The PyMOL Molecular Graphics System, Version 1.3r1. (2010)).

TABLE 4
X-ray crystal structure of LbNOX

| | LbNOX |
|---|---|
| Resolution range | 92.37-2.41 |
| Space group | P1 |
| Unit cell | 67.968 86.350 93.327 96.92 94.07 92.40 |
| Total reflections | |
| Unique reflections | 75784 |
| Multiplicity | |
| Completeness (%) | 97.98 |
| I/sigma(I) | |
| Wilson B-factor | |
| R-sym | |
| R-factor | 0.18 |
| R-free | 0.22 |
| Number of atoms | 146490 |
| Protein residues | |
| Water molecules | |
| RMS(bonds | 0.017 |
| RMS(angles) | 1.978 |
| Ramachandran favored (%) | |
| Ramachandran outliers (%) | |

[0226] The X-ray crystallography data described above were subsequently refined through further analysis. These data are presented in Table 5 below.

TABLE 5
X-ray Data Collection and Structure Refinement Statistics*

| Protein | NADH oxidase |
|---|---|
| Organism | Lactobacillus brevis |
| PDB ID | 5ER0 |
| Data collection | |
| Space group | P1 |
| Cell dimensions | |
| a, b, c (Å) | 67.9, 86.3, 93.3 |
| α, β, γ (°) | 96.9, 94.0, 92.4 |
| Resolution (Å) | 48.03-2.40, (2.49-2.40)** |
| No. reflections | 79832 (7488) |
| R_{sym} (%) | 11.2 (43.0) |
| Rₘₑₐₙₛ (%) | 13.0 (50.5) |
| <I/σ(I)> | 9.5 (2.1) |
| Wilson B-factor | 25.2 |
| Completeness (%) | 98.0 (91.8) |
| Multiplicity | 3.9 (3.5) |
| Refinement | |
| R-work | 0.1620 (0.2302) |
| R-free | 0.2008 (0.2652) |
| Number of non-hydrogen atoms | 14999 |
| protein | 13755 |
| ligands | 260 |
| water | 984 |
| Protein residues | 1804 |
| Number of monomers in ASU | 4 |
| RMS(bonds) (Å) | 0.008 |
| RMS(angles) (°) | 1.140 |
| Ramachandran favored (%) | 97 |
| Clashscore | 2.92 |
| Average B-factor | 29.4 |
| protein | 29.5 |
| ligands | 22.9 |
| solvent | 30.9 |
| Rotamer outliers (%) | 0.8 |

*Data were collected from a single crystal.
**Values in parentheses represent the highest-resolution shell.

[0227] Cell Proliferation Assays

[0228] A. Rescue of Chloramphenicol and Ethidium Bromide-Induced Inhibition of Cell Proliferation:

[0229] Five hundred HeLa Tet3G NDI1, Luciferase, LbNOX or mitoLbNOX cells were seeded in 200 μl of DMEM (DMEM (US Biological, D9800), 3.7 g/L NaHCO₃, 10% dialyzed FBS (Life Technologies, 26400-044)) per well in a black 96-well plate with clear bottom (Corning, 3904). Twenty four hours after seeding, media was exchanged to DMEM without pyruvate (DMEM (US Biological, D9802), 15.9 mg/L phenol red, 3.7 g/L NaHCO₃, 10% dialyzed FBS (Life Technologies, 26400-044))±10 μg/ml chloramphenicol±30 ng/ml ethidium bromide±1 mM pyruvate±300 ng/ml doxycycline. After 0, 2, 3, 4, 5 and 6 days, media was aspirated and cells were fixed by adding 100 μl of 4% paraformaldehyde in PBS and incubating at room temperature for at least 30 min. Paraformaldehyde solution was aspirated and cells were stained with 200 μl of 1 μg/ml Hoechst 33345 in PBS. Plates were covered with sealing aluminum foil and stored at 4° C. before counting cells in each well with Molecular Dynamics IMAGEXPRESS® Ultra (see “Nuclei counting using Molecular Devices IMAGEXPRESS® Ultra,” below).

[0230] B. Rescue of Piericidine and Antimycin-Induced Inhibition of Cell Proliferation:

[0231] One thousand HeLa Tet3G NDI1, Luciferase, LbNOX or mitoLbNOX cells were seeded in 200 μl of DMEM (DMEM (US Biological, D9800), 3.7 g/L NaHCO₃, 10% dialyzed FBS (Life Technologies, 26400-044)) per well in a black 96-well plate with clear bottom (Corning, 3904). Twenty four hours after seeding, 10 μl of 6 μg/ml doxycycline (300 ng/ml final concentration) or water was added to each well. Twenty four hours after addition of doxycycline, media was exchanged to DMEM without pyruvate (DMEM (US Biological, D9802), 15.9 mg/L phenol red, 3.7 g/L NaHCO₃, 10% dialyzed FBS (Life Technologies, 26400-044)), ±1 μM piericidin, ±1 μM antimycin, ±1 mM pyruvate and ±300 ng/ml doxycycline. After 0, 1, 2, 3 and 4 days, media was aspirated and cells were fixed by adding 100 μl of 4% paraformaldehyde in PBS and incubating at room temperature for at least 30 min. Paraformaldehyde solution was aspirated and cells were stained with 200 μl of 1 μg/ml Hoechst 33345. Plates were covered with sealing aluminum foil and stored at 4° C. before counting cells in each well with Molecular Dynamics IMAGEXPRESS® Ultra (see “Nuclei counting using Molecular Devices IMAGEXPRESS® Ultra,” below).

[0232] C. Rescue of pierecidin-induced inhibition of cell proliferation with pyruvate, lactate, malate, oxaloacetate, nicotinamide mononucleotide (PMN) and PJ34:

[0233] Two thousand HeLa Tet3G Luciferase cells were seeded in 200 μl of DMEM (DMEM (US Biological, D9800), 3.7 g/L NaHCO₃, 10% dialyzed FBS (Life Technologies, 26400-044)) per well in a black 96-well plate with clear bottom (Corning, 3904). Twenty four hours after seeding, media was exchanged to DMEM without pyruvate (DMEM (US Biological, D9802), 15.9 mg/L phenol red, 3.7 g/L NaHCO₃, 10% dialyzed FBS (Life Technologies, 26400-044))±1 μM piericidin, ±indicated concentrations of pyruvate, lactate, malate, oxaloacetate, nicotinamide mononucleotide (PMN) or PJ34. After 3 days, media was aspirated and cells were fixed by adding 100 μl of 4% paraformaldehyde in PBS and incubating at room temperature for at least 30 min. Paraformaldehyde solution was aspirated and cells were stained with 200 μl of 1 μg/ml Hoechst 33345. Plates were covered with sealing aluminum foil and stored at 4° C. before counting cells in each well with Molecular Dynamics IMAGEXPRESS® Ultra (see “Nuclei counting using Molecular Devices IMAGEXPRESS® Ultra,” below).

[0234] Nuclei Counting Using Molecular Devices IMAGEXPRESS® Ultra

[0235] Images of 96-well plates with fixed cells stained with Hoechst 33345 were collected using Molecular Devices IMAGEXPRESS® Micro XLS. Four images were taken to cover the whole well. Images were analyzed and nuclei number per well was counted using CellProfiler 2.0 image analysis software (Carpenter, et al., Genome Biol., 7:R100, 2006; and Kamentsky, et al., Bioinformatics, 27:1179, 2011). Cell counting method had a linear range from 500 to 40000 cells per well as determined by counting plates with known number of cells seeded 6 hours prior to fixation.

[0236] Glucose Concentration-Dependent Cell Survival

[0237] Ten thousand HeLa Tet3G NDI1, Luciferase, LbNOX or mitoLbNOX cells were seeded in 200 μl of DMEM (DMEM (US Biological, D9800), 3.7 g/L NaHCO₃, 10% dialyzed FBS (Life Technologies, 26400-044)) per well of a black 96-well plate with clear bottom (Corning, 3904). Twenty four hours after seeding, 10 μl of 6 μg/ml doxycycline (300 ng/ml final concentration) or water was added to each well. Twenty four hours after addition of doxycycline, media was exchanged to DMEM (DMEM (US Biological, D9800), 3.7 g/L NaHCO₃, 10% dialyzed FBS (Life Technologies, 26400-044))±300 ng/ml doxycycline. After 24 hours, media was exchanged to DMEM without glucose (DMEM (US Biological, D9800-02), 4 mM glutamine, 3.7 g/L NaHCO₃, 10% dialyzed FBS (Life Technologies, 26400-044))±1 μM piericidin, ±300 ng/ml doxycycline, ±indicated glucose concentration. After 24 hours, media was aspirated and cells were fixed by adding 100 μl of 4% paraformaldehyde in PBS and incubating at room temperature for at least 30 min. Paraformaldehyde solution was aspirated and cells were stained with 200 μl of 1 μg/ml Hoechst 33345. Plates were covered with sealing aluminum foil and stored at 4° C. before counting cells in each well with Molecular Dynamics IMAGEXPRESS® Ultra (see “Nuclei counting using Molecular Devices IMAGEXPRESS® Ultra,” above).

[0238] Analysis of PDH Phosphorylation

[0239] Two hundred thousand HeLa Tet3G Luciferase, LbNOX or mitoLbNOX cells were seeded in 2 ml of DMEM (DMEM (US Biological, D9800), 3.7 g/L NaHCO₃, 10% dialyzed FBS (Life Technologies, 26400-044)) per well of a 6-well plate. Twenty four hours after seeding, media was exchanged to DMEM without pyruvate (DMEM (US Biological (D9802), 15.9 mg/L phenol red, 3.7 g/L NaHCO₃, 10% dialyzed FBS (Life Technologies, 26400-044))±300 ng/ml doxycycline. Twenty four hours after doxycycline addition, media was exchanged to DMEM without pyruvate (DMEM (US Biological, D9802), 15.9 mg/L phenol red, 3.7 g/L NaHCO₃, 10% dialyzed FBS (Life Technologies, 26400-044))±300 ng/ml doxycycline±1 μM piericidin±5 mM dichloroacetate (DCA). One hour later, cells were rinsed with 2 ml of ice cold PBS and lysed in the well by adding 400 μl of ice cold 1× Laemmli Sample Buffer with 1× protease/phosphatase inhibitor cocktail (Cell Signaling, 5872S), incubated for 5 min on ice, transferred to an eppendorf tube and heated for 5 min at 95° C. Protein levels were detected using western blot with anti-FLAG antibody (Cell Signaling, 2368) for LbNOX and mitoLbNOX detection, anti-PDH-E1a antibody (Cell Signaling, 2784) and anti-PDH-E1a phosphor-Ser³⁰⁰ antibody (EMD Millipore, AP1064).

[0240] Metabolite Extraction and Media Preparation for Determination of Lactate, Pyruvate, NAD⁺ and NADH

[0241] One million HeLa Tet3G Luciferase, LbNOX or mitoLbNOX cells were seeded per a 10 cm plate in 10 ml of DMEM (DMEM (US Biological, D9800), 3.7 g/L NaHCO₃, 10% dialyzed FBS (Life Technologies, 26400-044)). Twenty four hours and 1 hour before extraction, media was exchanged to 10 ml of DMEM without pyruvate (DMEM (US Biological, D9802), 15.9 mg/L phenol red, 3.7 g/L NaHCO₃, 10% dialyzed FBS (Life Technologies, 26400-044)) with or without 300 ng/ml doxycycline. The media that was used 1 hour before extraction was preincubated overnight in tissue culture incubator without cells. Media was quickly aspirated, cells rinsed with 15 ml of ice-cold PBS, transferred to dry ice and 4 ml of dry ice cold solution of 80% methanol: 20% water (spiked with 5 μM Sodium L-Lactate-3,3,3-D3 and 0.2 μM Sodium [3-¹³C]Pyruvate) was added and quickly spread around by tilting the plate. The whole procedure from aspiration of media to adding 80% methanol solution took about ˜15 seconds. The plate was transferred on dry ice to −80° C. freezer and incubated for 15 min. Cells were collected with cell scraper while the plate was kept on dry ice and the solution was centrifuged at 2,000×g at 4° C. for 5 min. Supernatant was collected and stored on dry ice. The pellet was resuspended in 0.5 ml of 80% Methanol: 20% Water (spiked with 5 μM Sodium L-Lactate-3,3,3-D3 and 0.2 μM Sodium [3-¹³C]Pyruvate) at 4° C., vortexed for 10 sec, incubated for 15 min on wet ice and spun at 2000×g for 5 min. The pellet was reextracted one more time and all the supernatants were combined and stored at −80° C. overnight. Supernatants were evaporated using Speedvac (without heating) down to 1 ml, deproteinated by centrifuging through 10 kDa cutoff filter membrane and further evaporated down to 200 μl using Speedvac. Water was used to bring all the samples up to the same volume of 200 μl. Before analysis, the solutions were centrifuged at 20,000×g for 10 min to get rid of insoluble particles. These water solutions were used for determination of total NAD⁺/NADH using HPLC accompanied with a UV-vis detector. Samples were diluted with methanol to 80% methanol 20% water solution for LC-MS detection of lactate and pyruvate. Culture media samples were prepared for LC-MS detection of lactate and pyruvate by diluting culture media with methanol to 80% methanol 20% water solution (spiked with 50 μM Sodium L-Lactate-3,3,3-D3 and 2 μM Sodium [3-¹³C]Pyruvate), the 80% methanol solution was incubated at room temperature for 30 min and centrifuged at 20,000×g to pellet the protein precipitate. Supernatant was used for LC-MS analysis.

[0242] Determination of Total NAD÷/NADH Ratio by HPLC

[0243] Metabolites were analyzed by ion exchange chromatography using μBondapak NH2 300×3.9-mm column (Waters, WAT084040) attached to Agilent 1260 HPLC system. Column was maintained at 24° C. during runs. Typically 80-100 μl of the sample was injected, while the rest of the samples were kept at 4° C. in the autosampler module. Initial conditions were 96% of Buffer A (10 mM KH₂PO₄, pH 4.4) and 4% Buffer B (1000 mM KH₂PO₄, pH 4.5) and a flow rate of 1.0 ml/min. Between 10 and 40 min, Buffer B was increased to 45%. Between 40 and 41 min Buffer B was increased to 100% and kept at that concentration for 5 min. Between 46 and 47 min, Buffer B was decreased to 4% and held for 20 min at that composition to equilibrate the column between injections. Absorbance was monitored at 255 μM for NAD⁺ and 255 μM and 340 μM for NADH. Under these conditions, the retention time for NAD⁺ was 5.8 min and for NADH was 12.7 min. Calibration curves were generated using known amounts of NAD⁺ (0.3-2.4 pMoles) and NADH (0.05-0.3 pMoles). In this method we were also able to detect other nucleotides with the following retention times: AMP 6.7 min, ADP 18.6 min and ATP 27.5 min. Energy charge calculated ([ATP]+0.5 [ADP])/([ATP]+[ADP]+[AMP]) was usually ˜0.95.

[0244] LC-MS Method for Detection of Lactate and Pyruvate

[0245] An Agilent 1260 HPLC system coupled to Q Exactive Mass Spectrometer (ThermoFisher) was used to perform measurements of lactate and pyruvate in both the cell extract and cell media samples. A ZIC-cHILIC column 150×2.1 mm (3 μm particle size) (Merck) was used and kept at room temperature. Initial conditions were 15% of Buffer A (20 mM CH3COONH4-NaOH, pH 7.7) and 85% Buffer B (acetonitrile) and a flow rate of 0.22 ml/min. Between 0.5 and 3.5 min, Buffer B was decreased to 75%. Between 3.5 and 9 min Buffer B was decreased to 40%. Between 9 and 10.5 min Buffer B was decreased to 2% and kept at that concentration for 1 min. Between 11.5 and 12.5 Buffer B was increased to 85% and held for 12 min at that composition to equilibrate the column between injections. Needle washing solution was 75% acetonitrile. Ten microliters of the sample was injected into LC-MS. Negative mode ionization was applied. Targeted SIM method was used to acquire the MS data. The following MS conditions were used: microscan 1; resolution 140,000; AGC target 5E5; maximum 120 ms; msx 4; isolation window 1.0 m/z. The inclusion list was 87.0088 (pyruvate), 89.0244 (lactate), 90.0188 (sodium [3-¹³C]pyruvate), 92.0429 (sodium L-lactate-3,3,3-D3). The ratio of the peak intensity of lactate or pyruvate to peak intensity of isotope labeled lactate or pyruvate was calculated. The isotope ratio method was used to quantify the lactate and pyruvate in the cell extract and media.

[0246] Fluorescence Microscopy

[0247] One hundred thousand HeLa Tet3G Luciferase, LbNOX or mitoLbNOX cells were seeded per well of 6-well plate (with a No 1.5 coverslip in each well) in 2 ml of DMEM (DMEM (US Biological, D9800), 3.7 g/L NaHCO₃, 10% dialyzed FBS (Life Technologies, 26400-044)). Twenty four hours after seeding, media was exchanged to 2 ml of DMEM (DMEM (US Biological, D9800), 3.7 g/L NaHCO₃, 10% dialyzed FBS (Life Technologies, 26400-044)) with 300 ng/ml doxycycline. Twenty four hours after dox addition, coverslip was removed from the well, rinsed in warm PBS (37° C.), fixed in 4% paraformaldehyde in warm PBS (37° C.) for 5 min, rinsed in PBS and quenched with TBS, 0.1% Triton X-100 for 10 min. Coverslips were blocked with PBS, 2% BSA, 0.1% Triton X-100 for 10 min, stained with mouse anti-Tomm20 (Santa Cruz, sc-17764) in PBS, 2% BSA, 0.1% Triton X-100 for 1 hour, washed 3 times for 5 min with PBS, then stained with both ALEXA FLUOR® 488-conjugated anti-FLAG (Cell Signaling, 3916) and ALEXA FLUOR® 645-conjugated anti-mouse IgG secondary antibody (Cell Signaling, 4408) in PBS, 2% BSA, 0.1% Triton X-100 for 1 hour and washed 3 times for 5 min with PBS. Coverslip were mounted on slides using PROLONG GOLD® (Life Technologies, P10144). Fluorescent images were acquired using Leica SPS AOBS Scanning Laser Confocal Microscope (HCX PL APO CS 40×1.25NA Oil UV objective, Argon 488 μM laser for ALEXA FLUOR® 488 and HeNe 633 μM laser for ALEXA FLUOR® 645).

[0248] Gluconeogenesis in Primary Hepatocytes

[0249] Primary hepatocytes were obtained from the MGH Cell Resource Core, where they were freshly isolated by collagenase perfusion of livers from 24-hour fasted Sprague-Dawley rats and plated onto 24-well collagen-coated plates. Twenty four thousand cells were plated and cultured overnight in isolation media (DMEM with high glucose and pyruvate (Life Technologies, 11995)) supplemented with 20 ng/mL epidermal growth factor, 14.3 μg/mL glucagon, insulin, 7.5 μg/mL hydrocortisone, 10% FBS, 1% Penicillin-streptomycin). Cells were then transduced with the indicated adenoviral vector (MOI 20) and were serum starved by incubating in DMEM without additional supplementation overnight. Twenty-four hours after transduction the cells were washed twice with PBS and placed in glucose-free DMEM for 2 hours to deplete any residual glycogen stores. This media was removed and replaced with fresh glucose-free, glutamine-free and phenol-red free DMEM (Life Technologies, A14430) supplemented with lactate to a final concentration of 5 mM. Media was sampled 6 hours later and glucose was measured using the AMPLEX® Red Glucose Assay (Life-Technologies) and normalized to total protein levels from hepatocytes lysed in 1% SDS as measured by the BCA assay. Separate glucose standardization curves for the Amplex Red assay were created in the presence of gluconeogenic substrate used.

### Example 2. Structural and Functional Properties of LbNOX and mitoLbNOX

[0250] The proposed mechanism by which LbNOX catalyzes the oxidation of NADH to NAD⁺, as well as the residues that establish critical contacts with cofactors, are manifested in the intermolecular contacts revealed by the crystal structure of LbNOX. A 2.4 Å resolution X-ray structure of a fusion protein consisting of LbNOX and a FLAG epitope tag was solved in order to probe the structural features of LbNOX that relate to its enzymatic activity. The details of this structure are reported in Table 4. Two molecules of LbNOX-FLAG related by non-crystallographic two-fold symmetry form a tightly associated dimer (2682 Å² of buried surface area (BSA)) in which the C-terminal dimerization domain of each monomer penetrates deep into its pair mate active site comprised of the FAD and the redox active Cys82 (FIG. 1E). The main chain carbonyl oxygen of Phe422 in each monomer is hydrogen bonded to N3 of FAD, an interaction likely to contribute to the catalytic function of LbNOX. Molecular oxygen (O₂) is bound in the active site of each monomer and unlike other related structures the redox active Cys82 of LbNOX is in a reduced form, facing away from the isoalloxazine ring, and well separated from O₂ (FIG. 8). Two dimers of LbNOX are linked into a tetramer within the asymmetric unit of the triclinic crystal lattice, consistent with the tetramer found in solution. The interaction between the dimers (2×769 Å² BSA) is significantly weaker than that within the catalytic dimer. LbNOX selectively oxidizes NADH over NADPH, and this substrate specificity can be explained structurally by the steric effect of Asp177, which would clash with the phosphate moiety of NADPH. This substrate selectivity is also explained by the lack of cationic residues at positions 178,179, and 184, (SEQ ID NO: 1) which are required for stabilization of NADPH binding (FIG. 1E). The high selectivity for NADH over NADPH, negligible H₂O₂ production relative to H₂O, and very low K_{M} for O₂ renders LbNOX an attractive enzyme for therapeutic application in mammalian cells (e.g., human cells).

### Example 3. Water-Forming NADH Oxidases Increase Oxygen Consumption in Mammalian Cells

[0251] The water-forming NADH oxidases for use in the compositions and methods of the invention can be expressed in mammalian cells (e.g., human cells) using any of a variety of established methods that are known in the art. These enzymes can additionally be directed to selectively localize to a specific organelle by conjugation of these proteins with organelle-targeting sequences. Expression of both LbNOX and LbNOX conjugated to a polypeptide containing the mitochondrial targeting sequence of subunit IV of human cytochrome c oxidase (hereinafter “mitoLbNOX”) in HeLa cells led to a robust increase in oxygen consumption (FIG. 2C). LbNOX and mitoLbNOX increased oxygen consumption of HeLa cells by 1.6 and 2.4-fold, respectively. Increase in oxygen consumption induced by LbNOX expression was resistant to 1 μM piericidin, a known inhibitor of complex I, as well as to 1 μM antimycin, a known inhibitor of complex III, indicating that the increase in oxygen consumption is due to LbNOX oxidase activity and not due to the increased activity of mitochondrial electron transport chain (Srivastava, et al., FEBS J., 274:4788, 2007). Addition of doxycycline had no effect on oxygen consumption of HeLa cells expressing Luciferase under the control of TRE3G promoter (FIG. 9A). Significantly, mitoLbNOX induced a larger increase in oxygen consumption than LbNOX (FIG. 2C), likely due to the higher concentration of NADH within mitochondria (Hung, et al., Cell Metab., 14:545, 2011; Williamson, et al., Biochemic. J., 103:514, 1967; and Zhao, et al., Cell Metab., 14:555, 2011).

### Example 4. Water-Forming NADH Oxidases Increase the Ratio of NAD⁺ to NADH in Mammalian Cells

[0252] mitoLbNOX also exhibited the ability to increase the total NAD⁺/NADH ratio by 2-fold, while LbNOX or Luciferase did not have a significant effect on this ratio since these enzymes were not targeted to the mitochondria (FIG. 3A and FIG. 9B). Perturbation of total NAD⁺/NADH in this experiment is specifically due to changes in mitochondrial NADH because most of the effect on the ratio was due to changes in NADH concentration and most of the NADH inside the cell comes from mitochondria. The latter is supported by fractionation experiments and by the observation that the majority of NAD(P)H autofluorescence in cells comes from mitochondria.

[0253] To specifically interrogate the cytoplasmic free NAD⁺/NADH, the effect of LbNOX and mitoLbNOX on the intracellular and secreted lactate/pyruvate ratio was determined (FIG. 3B). Intracellular and secreted lactate/pyruvate ratio is believed to be in equilibrium with cytoplasmic NAD⁺/NADH through the reaction catalyzed by lactate dehydrogenase. Both LbNOX and mitoLbNOX decreased intracellular and secreted lactate/pyruvate ratio by 1.5-2-fold (i.e. increased cytoplasmic NAD⁺/NADH) with LbNOX being slightly more active (FIG. 2C). Luciferase expression had no effect on either of those parameters (FIG. 9C). Thus, LbNOX is more active at perturbing cytoplasmic NAD⁺/NADH, while mitoLbNOX is more active at perturbing mitochondrial NAD⁺/NADH. These data show that cytoplasmic and mitochondrial NAD⁺/NADH ratios can be regulated independently to some extent despite being connected through NADH shuttle systems (e.g. glycerol-3-phosphate and aspartate-malate shuttles) and that this compartmentalization can be modulated using water-forming NADH oxidases. Of particular significance is the use of water-forming NADH oxidases that comprise a fusion protein including a targeting sequence that localizes the oxidase to a particular organelle within the mammalian cell to perturb reductive potential in a compartment-specific manner.

### Example 5. Water-Forming NADH Oxidase Activity Dictates the Phosphorylation State of Pyruvate Dehydrogenase Complex in Mammalian Cells

[0254] LbNOX is also capable of modulating the phosphorylation state of pyruvate dehydrogenase complex (PDH), which is known to be regulated by NAD⁺/NADH based on in vitro studies. As shown in FIGS. 3C and 9D, mitoLbNOX was capable of inducing the dephosphorylation of PDH, thus confirming the physiological impact of compartment-specific perturbation of mitochondrial NAD⁺/NADH by mitoLbNOX. This example demonstrates that PDH activity is regulated by mitochondrial NAD⁺/NADH in vivo, and underscores the ability of water-forming NADH oxidases to modulate metabolic activity in a compartment-specific manner. This is the first time this activity has been shown in vivo.

### Example 6. Water-Forming NADH Oxidases Potentiate Gluconeogenesis in Mammalian Cells

[0255] As a result of its ability to elevate the intracellular ratio of NAD⁺ to NADH, LbNOX is also capable of potentiating gluconeogenesis in mammalian cells (e.g., human cells). The first step of gluconeogenesis from lactate is the conversion of lactate to pyruvate, which requires cytosolic NAD⁺. Gluconeogenesis from lactate was significantly increased when primary hepatocytes were transduced with either LbNOX or mitoLbNOX-containing adenovirus (FIG. 3D). The effect of LbNOX and mitoLbNOX on gluconeogenesis was commensurate to their effect on lactate/pyruvate ratio (FIG. 3B), suggesting that cytoplasmic and not mitochondrial NAD⁺/NADH is important for regulation of gluconeogenesis rate from lactate. These examples demonstrate the ability of water-forming NADH oxidases to control the rate of gluconeogenesis upon introducing these enzymes to mammalian cells.

### Example 7. Water-Forming NADH Oxidases Restore the Ability of Mammalian Cells to Proliferate in the Presence of Mitochondrial Respiratory Chain Inhibitors

[0256] It has been known for years that mammalian cells that lack mitochondrial DNA (mtDNA) require the addition of exogenous pyruvate and uridine for cell proliferation. Uridine is thought to be required because one of the enzymes in de novo uridine biosynthesis (DHODH—dehydroorotate dehydrogenase) is Coenzyme Q (CoQ)-dependent, and thus requires a functional respiratory chain for activity. The requirement of pyruvate is not well understood because it has so many fates and participates in so many reactions. It has been proposed that pyruvate might work by stimulating NAD⁺ recycling via cytosolic lactate dehydrogenase. While an attractive explanation, this hypothesis has never been rigorously evaluated because of a lack of methods to specifically promote NAD⁺ recycling in the absence of respiratory chain activity. This hypothesis was tested directly by introducing LbNOX to mammalian cells that contain functionally deficient respiratory chains. In order to inhibit respiratory chain activity, mammalian cells were treated with piericidin (a complex I inhibitor), antimycin (a complex III inhibitor), ethidium bromide (a mtDNA replication inhibitor) and chloramphenicol (a mitochondrial translation inhibitor). HeLa cells are incapable of proliferating in the presence of these inhibitors without supplementation by pyruvate and uridine (FIG. 4 and FIG. 10). Both LbNOX and mitoLbNOX rescued the proliferation defect caused by all of these inhibitors. The growth rate was rescued completely as judged by the slope of logarithmic growth curves at the end of the experiment, except for the rescue of antimycin effect by mitoLbNOX, which was partial (FIG. 4A). Under several conditions tested there was a lag of about two days when LbNOX and mitoLbNOX expressing cells proliferated slower than cells with intact respiratory chain. These data suggest that NAD⁺ recycling is an essential function of the respiratory chain that is required for mammalian cell proliferation and that water-forming NADH oxidases, such as LbNOX, can alleviate the reductive stress associated with respiratory chain inhibition. As a control, we tested whether LbNOX and mitoLbNOX expression had any effect on the proton pumping and ATP synthesis functions of the respiratory chain in the presence of established inhibitors. We used cell survival in the presence of low glucose concentrations as a readout of respiratory chain-derived ATP synthesis, which is driven by the proton pumping function of the respiratory chain. Both LbNOX and mitoLbNOX had no effect on a decrease in cell number in the presence of piericidin or antimycin at low glucose concentrations (FIG. 11). The yeast Ndi1 protein, which can restore both NAD⁺ recycling and proton pumping at complexes III and IV in the presence of piericidin, was used as a positive control. Ndi1 rescued the effect of piericidin but not other ETC inhibitors on both cell proliferation and cell survival at low glucose concentrations (FIG. 10 and FIG. 11).

[0257] The above experiments, employing LbNOX as a genetic tool, clearly demonstrate that NAD⁺ recycling is an important function of the respiratory chain required for mammalian cell proliferation. In order to further validate this hypothesis, we tested whether other metabolites in addition to pyruvate can rescue the proliferation defect induced by ETC impairment. If the NAD⁺ recycling hypothesis is correct then supplementation with oxaloacetate should also rescue the proliferation defect, whereas supplementation with either lactate or malate should not. Oxaloacetate should have the same effect as pyruvate because it can be reduced to malate by malate dehydrogenase while recycling NAD⁺. In agreement with the hypothesis, the data clearly show that both pyruvate and oxaloacetate rescue the proliferation defect induced by piericidin while lactate and malate do not (FIG. 4E). Recent studies have shown that in animal models of mitochondrial disease, supplementation with precursors to NAD⁺ biosynthesis (or alternatively, blockade of NAD⁺ catabolism) can retard disease progression. At present, mechanistic basis for this protective effect is not known. The NAD⁺ precursor PMN and poly ADP ribose polymerase (PARP) inhibitor PJ34 did not rescue piericidin induced proliferation defect (FIG. 12), indicating that these interventions act by mechanisms distinct from NAD⁺ recycling.

### Example 8. Water-Forming NADH Oxidases Derived from Eukaryotic Cells can Alleviate Pyruvate Auxotrophy in Mammalian Cells

[0258] GiNOX, a water-forming NADH oxidase derived from Giardia intestinalis, and mitoGiNOX are capable of restoring the proliferation of mammalian cells cultured in pyruvate-depleted media and in the presence of antimycin, a complex III inhibitor. HeLa Tet3G cells cultured in the presence of varying concentrations of pyruvate demonstrated a diminished pyruvate-dependency in the presence of antimycin when GiNOX and mitoGiNOX were expressed in these cells (FIG. 13). Notably, both GiNOX and mitoGiNOX were capable of alleviating the pyruvate auxotrophy, which further illustrates that cytosolic water-forming NADH oxidases can ameliorate the effects of a defective respiratory chain, as these enzymes need not be targeted to the mitochondria in order to restore redox balance.

### Example 9. Treatment of a Mitochondrial Disease in a Human Patient by Administration of a Water-Forming NADH Oxidase

[0259] The water-forming NADH oxidases for use in the compositions and methods of the invention can be administered to a human patient in order to mitigate a disease caused by a dysfunctional mitochondrial respiratory chain or one or more of its symptoms. For instance, a human patient presenting with a disease caused by a dysfunctional complex I protein can be treated by administering one or more of the compositions of the invention that contain or encode a water-forming NADH oxidase by an appropriate route (e.g., intravenously) at a particular dosage (e.g., between 0.001 and 100 mg/kg/day) over a course of days, weeks, months, or years. If desired, the water-forming NADH oxidase can be modified, e.g., by hyperglycosylation or by conjugation with PEG, so as to evade immune recognition and/or to improve the pharmacokinetic profile of the enzyme.

[0260] The progression of the disease can be monitored by any of several methods. A physician can monitor the patient by direct observation in order to evaluate how the symptoms exhibited by the patient have changed in response to treatment. Optionally, cells can be extracted from the patient and a quantitative biochemical analysis can be conducted in order to determine the intracellular concentrations of certain metabolites and cofactors (e.g., NADH, NAD⁺, glucose, pyruvate, lactate, etc). Based on the results of these analyses, a physician may prescribe higher or lower dosages of the water-forming NADH oxidase in subsequent rounds of treatment.

### Example 10. Treatment of a Mitochondrial Disease in a Human Patient by Administration of a Human Cell Encoding a Water-Forming NADH Oxidase

[0261] Another treatment regimen includes administering human cells that have been modified to express a water-forming NADH oxidase to a patient presenting with a disease, condition, or symptom associated with mitochondrial respiratory chain dysfunction. For example, autologous cells from a particular organ of a patient can be extracted and genetically modified ex vivo (e.g., using any of the methods or techniques described herein or known in the art) so as to express a water-forming NADH oxidase from the nuclear genome of the cell. The cell can then be re-administered to the patient in order to mitigate the disease, condition, or symptom of interest. Optionally, allogeneic cells from another human can be extracted, genetically modified to express a water-forming NADH oxidase, and subsequently administered to the patient.

[0262] In the case of allogeneic therapy, it may be desirable to obtain the cells from a close relative of the patient (e.g., a parent or sibling) in order to minimize allograft rejection by the patient. Another technique that can be employed in order to attenuate the immune response of the patient against allogeneic cells expressing water-forming NADH oxidases involves the genetic silencing of the major histocompatability complex (MHC) class I proteins. These molecules are presented on the surfaces of all somatic cells and represent one mechanism by which the immune system of a patient can recognize and clear foreign cells from the body. As such, it may be desirable to genetically alter allogeneic cells so as to express silencing RNA capable of preventing the translation of functional MHC proteins prior to administration of these cells to a patient. MHC-silenced allogeneic cells expressing a water-forming NADH oxidase can subsequently be administered to a patient in order to improve the survival and proliferation of these cells in vivo.

### Example 11. Rational Design of a NADPH-Specific Water-Forming NADPH Oxidase

[0263] We developed a variant of LbNOX that was engineered to be specific for NADPH (referred to as TPNOX; SEQ ID NO: 329). This variant can be used as a genetically encoded tool for promoting a compartment-specific increase of NADP⁺/NADPH ratio in cells.

[0264] Several examples of engineering the NAD(P)H cofactor preference of various oxidoreductases have been described (Bernard et al. Biochemical and biophysical research communications 208:895-900 (1995); Mittl et al. Protein science: a publication of the Protein Society 3:1504-1514 (1994); Scrutton et al. Nature 343:38-43 (1990); Brondani et al. Journal of the American Chemical Society 136:16966-16969 (2014); Elmore et al. Journal of Biological Chemistry 277:48960-48964 (2002); Khoury et al. Protein science: a publication of the Protein Society 18:2125-2138 (2009); Rane et al. Archives of biochemistry and biophysics 338:83-89 (1997); Rosell et al. Journal of Biological Chemistry 278:40576-40580; and Brinkmann-Chen et al. Proceedings of the National Academy of Sciences of the United States of America 110:10946-10951 (2013)). Based on the accumulated structural and biochemical data (Wallen et al. Biochemistry 47:5182-5193 (2008); Wallen et al. Biochemistry 54:6815-6829 (2015); and Petschacher et al. Computational and Structural Biotechnology Journal 9:e201402005 (2014)).

[0265] We mutated five (5) residues in LbNOX. These residues are located in both the dinucleotide-binding motif and in the cofactor specificity loop. The result was a quintuple mutant, TPNOX (see positions 1-5 of FIG. 14).

[0266] In TPNOX, neutral Ala177 in position 2 replaces negatively charged Asp in LbNOX to remove the charge repulsion with the phosphate moiety in the 2′ position of NADPH. In positions 3 and 5, positively charged Arg178 and Arg184 were introduced, as they provide stabilizing electrostatic interactions with the phosphate group of NADPH. In position 3, Ser179 was introduced to provide a hydrogen bond donor for interaction with the phosphate group. Finally, a Gly to Ala mutation was included (position 1, FIG. 14) in order to retain the high enzymatic activity of TPNOX.

[0267] The enzymatic properties of the engineered TPNOX were evaluated (FIG. 15), and this enzyme was found to be highly reactive with NADPH (k_{cat} 268±4 s⁻¹) while virtually non-reactive with NADH (k_{cat} 3.2±0.2 s⁻¹). The K_{M} of TPNOX for NADPH (22±2 μM) is lower than the K_{M} of LbNOX for NADH (69±3 μM). Effectively, TPNOX is 1120 fold more reactive with NADPH than with NADH based on respective k_{cat}/K_{M} values, which represents unprecedented substrate specificity switch.

[0268] Lentiviral infection was used to generate HeLa cells that expressed untargeted or mitochondria-targeted TPNOX (referred to as TPNOX and mitoTPNOX, respectively) under the control of a doxycycline-inducible promoter (TRE3G) (FIG. 16A). Expression of TPNOX and mitoTPNOX in HeLa cells is safely tolerated, without an obvious impact on cell morphology, viability, or proliferation. Expression of TPNOX and mitoTPNOX increased oxygen consumption by 1.7 and 2.6-fold, respectively (FIG. 16B), demonstrating that the enzymes are active in human cells. The increase in oxygen consumption was resistant to the electron transport chain inhibitor, antimycin, indicating that it is due to TPNOX activity and not due to increased electron transport chain activity. These data indicate that TPNOX and mitoTPNOX can be targeted to different compartments of human cells where they retain their activity.

[0269] In summary, rational mutagenesis was used to design the first water-forming NADPH oxidase, TPNOX, with exceptional specificity for NADPH. We validated its specificity for NADPH vs. NADH and showed that TPNOX is active when expressed in HeLa cells. In the same way that LbNOX is useful for studying the role of NAD⁺/NADH in cell physiology and disease, TPNOX and other NADPH-specific water-forming NADPH oxidases designed using this platform represent valuable genetic tools for studying the role of compartment-specific changes of NADP⁺/NADPH ratio in physiology and disease.

### Example 12. Water-Forming NADPH Oxidases can Manipulate the Mitochondrial NAD⁺:NADH Ratio and Rescue Proliferation of Mammalian Cells in the Presence of a Complex I Inhibitor

[0270] Water-forming NADPH oxidases, such as TPNOX and mitoTPNOX, can be used as protein therapeutics for the treatment of disorders caused by excess production of NADH or NADPH or insufficient consumption of NADPH. Furthermore, mitoTPNOX expression can induce similar biochemical effects as those induced by mitoLbNOX expression. This is due in part to the connection between NAD⁺/NADH and NADP⁺/NADPH pools in the mitochondria through the action of several enzymes, including transhydrogenase (NNT) and glutamate dehydrogenase (GDH). Therefore, manipulation of the mitochondrial NADP⁺/NADPH ratio by mitoTPNOX can lead to manipulation of the mitochondrial NAD⁺/NADH ratio.

[0271] An example of this biological activity is shown in FIGS. 17A-C, which present graphs showing that expression of mitoTPNOX rescues proliferation of mammalian cells in the presence of piericidine, which is an inhibitor of Complex I of the mitochondrial electron transport chain. This rescue may be the result of indirect manipulation of the mitochondrial NAD⁺/NADH ratio by mitoTPNOX. Therefore, mitoTPNOX (like LbNOX and mitoLbNOX) can be used as a protein therapeutic for the treatment of mitochondrial disorders caused by the overproduction of NADH.

[0272] Materials and Methods

[0273] One thousand HeLa Tet3G Luciferase, TPNOX, or mitoTPNOX cells were seeded in 200 μl of DMEM (DMEM (US Biological, D9800), 3.7 g/L NaHCO₃, 10% dialyzed FBS (Life Technologies, 26400-044)) per well in a black 96-well plate with a clear bottom (Corning, 3904). Twenty four hours after seeding, 10 μl of 6 μg/ml doxycycline (300 ng/ml final concentration) or water was added to each well. Twenty four hours after addition of doxycycline, media was exchanged to DMEM without pyruvate (DMEM (US Biological, D9802), 15.9 mg/L phenol red, 3.7 g/L NaHCO₃, 10% dialyzed FBS (Life Technologies, 26400-044)), ±1 μM piericidin, ±1 mM pyruvate and ±300 ng/ml doxycycline. After 0, 1, 2, 3 and 4 days, media was aspirated and cells were fixed by adding 100 μl of 4% paraformaldehyde in PBS and incubating at room temperature for at least 30 min. The paraformaldehyde solution was aspirated and the cells were stained with 200 μl of 1 μg/ml Hoechst 33345. Plates were covered with sealing aluminum foil and stored at 4° C. before counting cells in each well with Molecular Dynamics IMAGEXPRESS® Ultra (see “Nuclei counting using Molecular Devices IMAGEXPRESS® Ultra”).

### OTHER EMBODIMENTS

[0274] All publications, patents, and patent applications mentioned in this specification are incorporated herein by reference to the same extent as if each independent publication or patent application was specifically and individually indicated to be incorporated by reference.

[0275] While the invention has been described in connection with specific embodiments thereof, it will be understood that it is capable of further modifications and this application is intended to cover any variations, uses, or adaptations for use in the compositions and methods of the invention following, in general, the principles for use in the compositions and methods of the invention and including such departures from the present disclosure that come within known or customary practice within the art to which the invention pertains and may be applied to the essential features hereinbefore set forth, and follows in the scope of the claims.

[0276] Other embodiments are within the claims.

1. A mammalian cell comprising a water-forming NADH oxidase or a water-forming NADPH oxidase or a polynucleotide encoding said water-forming NADH oxidase or water-forming NADPH oxidase, respectively.

2. (canceled)

3. The mammalian cell of claim 1, wherein:
a) the polynucleotide is under the control of a mammalian promoter;
b) the polynucleotide is codon-optimized for expression in said mammalian cell; and/or
c) said mammalian cell comprises nuclear and mitochondrial genomes, and the polynucleotide is integrated into the nuclear or mitochondrial genome of the mammalian cell.

4-5. (canceled)

6. The mammalian cell of claim 1, wherein:
a) the mammalian cell is a human cell;
b) the NADH oxidase is not endogenous to the mammalian cell;
c) the water-forming NADH oxidase comprises a polypeptide sequence having at least 85% sequence identity to the sequence of any one of SEQ ID NOs: 1-273;
d) the water-forming NADPH oxidase comprises a polypeptide sequence having at least 85% sequence identity to the sequence of SEQ ID NO: 329, wherein said NADPH oxidase comprises one or more mutations in the dinucleotide-binding motif region (residues 153-158) or the cofactor specific loop region (residues 176-183) of SEQ ID NO: 1, optionally wherein the one or more mutations in the dinucleotide-binding motif region (residues 153-158) or the cofactor specific loop region (residues 176-183) of SEQ ID NO: 1 are selected from the group consisting of G158A, D176A, A177R, M178S, and P183R relative to the amino acid sequence of SEQ ID NO: 1;
e) the water-forming NADPH oxidase comprises a polypeptide sequence having at least 85% sequence identity to the sequence of SEQ ID NO: 330, wherein said NADPH oxidase comprises one or more mutations in the cofactor specific loop region (residues 191-198) of SEQ ID NO: 4, optionally wherein the one or more mutations in the cofactor specific loop region (residues 191-198) of SEQ ID NO: 4 are selected from the group consisting of D191A, V192R, V193H, and A198R relative to the amino acid sequence of SEQ ID NO: 4;
f) the water-forming NADPH oxidase comprises a polypeptide having the amino acid sequence of SEQ ID NO: 329 or 330; and/or
g) said water-forming NADH oxidase or water-forming NADPH oxidase is a fusion protein comprising an additional molecule selected from the group consisting of an antibody Fc region, a cell penetrating peptide, a molecule that increases the serum half-life of the fusion protein, a molecule that increases the solubility of the water-forming NADH oxidase or water-forming NADPH oxidase, or a targeting molecule that selectively localizes to a particular organelle within the cell, optionally wherein the molecule that selectively localizes to the mitochondria is the mitochondrial targeting sequence of subunit IV of human cytochrome c oxidase.

7-8. (canceled)

9. The mammalian cell of claim 1, wherein the mammalian cell comprises said water-forming NADH oxidase, wherein said water-forming NADH oxidase:
a. exhibits Km values for NADH and O₂ of no more than about 100 μM and 20 μM, respectively; and/or
b. is capable of producing less than about 10% by mole of H₂O₂ compared to H₂O production during the catalytic cycle of said oxidase; and/or
c. produces less than about 2% by mole of H₂O₂ compared to H₂O production during the catalytic cycle of said oxidase; and/or
d. is capable of selectively oxidizing NADH over NADPH; and/or
e. is capable of binding flavin adenine dinucleotide (FAD) when the NADH oxidase is in a catalytically active state; and/or
f. is capable of selectively reducing the secreted or cytosolic ratio of lactate to pyruvate; and/or
g. is capable of increasing oxygen consumption by a mammalian cell without increasing the rate of adenosine triphosphate (ATP) synthesis; and/or
h. is capable of increasing the rate of glucose production by gluconeogenesis; and/or
i. is capable of increasing the rate of proliferation of a mammalian cell in which there is a defect in the replication of mitochondrial DNA; and/or
j. is capable of increasing the rate of proliferation of a mammalian cell in which there is a defect in the translation of mitochondrial proteins;
and/or wherein the mammalian cell comprises said water-forming NADPH oxidase, wherein said water-forming NADPH oxidase:
a) exhibits a Km value for NADPH of no more than about 100 μM;
b) is is capable of selectively oxidizing NADPH over NADH; and/or
c) is capable of increasing oxygen consumption by a mammalian cell.

10-16. (canceled)

17. A polynucleotide comprising a nucleic acid sequence encoding a water-forming NADH oxidase or a water-forming NADPH oxidase, wherein said nucleic acid sequence further comprises a mammalian promoter or a nucleic acid sequence that encodes a cell-penetrating peptide or a peptide that localizes to a particular organelle within a mammalian cell.

18. The polynucleotide of claim 17, wherein:
a) the polynucleotide has been codon-optimized for expression in a mammalian cell;
b) the polynucleotide is part of a transposable element, optionally wherein the polynucleotide comprises a transposase recognition and cleavage element for incorporation into a deoxyribonucleic acid (DNA) molecule of a mammalian cell;
c) the water-forming NADH oxidase has an amino acid sequence with at least 85% sequence identity to the amino acid sequence of any one of SEQ ID NOs: 1-273;
d) the water-forming NADPH oxidase has an amino acid sequence with at least 85% sequence identity to the amino acid sequence of SEQ ID NO: 330, wherein said NADPH oxidase comprises one or more mutations in the cofactor specific loop region (residues 191-198) of SEQ ID NO: 4, optionally wherein said one or more mutations in the cofactor specific loop region (residues 191-198) of SEQ ID NO: 4 are selected from the group consisting of D191A, V192R, V193H, and A198R relative to the amino acid sequence of SEQ ID NO: 4; and/or
e) said water-forming NADH oxidase or water-forming NADPH oxidase is a fusion protein comprising an additional molecule selected from the group consisting of an antibody Fc region, a cell penetrating peptide, a molecule that increases the serum half-life of the fusion protein, a molecule that increases the solubility of the water-forming NADH oxidase or water-forming NADPH oxidase, or a targeting molecule that selectively localizes to a particular organelle within the cell, optionally wherein the molecule that selectively localizes to the mitochondria is the mitochondrial targeting sequence of subunit IV of human cytochrome c oxidase.

19-29. (canceled)

30. A vector comprising the polynucleotide of claim 17.

31-37. (canceled)

38. A polypeptide comprising a water-forming NADH oxidase or a water-forming NADPH oxidase and an additional molecule, wherein the additional molecule comprises an antibody Fc region, a cell-penetrating peptide, a molecule that increases the serum half-life of the polypeptide, a molecule that increases the solubility of the NADH oxidase, or a targeting molecule that selectively localizes the polypeptide to a particular organelle within a mammalian cell.

39. The polypeptide of claim 38, wherein the targeting molecules is a mitochondrial targeting sequence, such as a sequence comprising subunit IV of human cytochrome c oxidase.

40-42. (canceled)

43. The polypeptide of claim 38, wherein:
a) the NADH oxidase comprises a polypeptide sequence having at least 85% sequence identity to the sequence of any one of SEQ ID NOs: 1-273;
b) the NADPH oxidase comprises a polypeptide sequence having at least 85% sequence identity to the sequence of SEQ ID NO: 330, wherein said NADPH oxidase comprises one or more mutations in the cofactor specific loop region (residues 191-198) of SEQ ID NO: 4, optionally wherein the one or more mutations in the cofactor specific loop region (residues 191-198) of SEQ ID NO: 4 are selected from the group consisting of D191A, V192R, V193H, and A198R relative to the amino acid sequence of SEQ ID NO: 4;
c) the NADH oxidase exhibits Km values for NADH and O₂ of no more than about 100 μM and 20 μM, respectively;
d) the NADH oxidase is capable of producing less than about 10% by mole of H₂O₂ compared to H₂O production during the catalytic cycle of said oxidase;
e) the NADH oxidase produces less than about 2% by mole of H₂O₂ compared to H₂O production during the catalytic cycle of said oxidase;
f) the NADH oxidase is capable of selectively oxidizing NADH over NADPH;
g) the NADH oxidase is capable of binding flavin adenine dinucleotide (FAD) when the NADH oxidase is in a catalytically active state;
h) the NADH oxidase is capable of selectively reducing the secreted or cytosolic ratio of lactate to pyruvate;
i) the NADH oxidase is capable of increasing oxygen consumption by a mammalian cell without increasing the rate of adenosine triphosphate (ATP) synthesis;
j the NADH oxidase is capable of increasing the rate of glucose production by gluconeogenesis:
k) the NADH oxidase is capable of increasing the rate of proliferation of a mammalian cell in which there is a defect in the replication of mitochondrial DNA; and/or
l) the NADH oxidase is capable of increasing the rate of proliferation of a mammalian cell in which there is a defect in the translation of mitochondrial proteins.

44. (canceled)

45. A composition comprising a water-forming NADH oxidase or a water-forming NADPH oxidase or a polynucleotide encoding the water-forming NADH oxidase or water-forming NADPH oxidase, respectively, wherein said composition is formulated for administration to a mammal.

46-72. (canceled)

73. A method for treating cancer or a disease or condition in a mammal caused by mitochondrial dysfunction comprising administering the composition of claim 45 to said mammal.

74-77. (canceled)

78. The method of claim 73, wherein:
a) the disease or condition is selected from the group consisting of mitochondrial myopathy, Wolff-Parkinsons-White syndrome, neuropathy, ataxia, Friedreich's ataxia, retinitis pigmentosa, and ptosis (NARP), myoneurogenic gastrointestinal encephalopathy (MNGIE), myoclonic epilepsy with ragged red fibers (MERRF), mitochondrial encephalomyopathy, lactic acidosis, and stroke-like symptoms (MELAS), mitochondrial DNA depletion, chronic progressive external ophthalmoplegia, Kearns-Sayre syndrome, Leber hereditary optic neuropathy, mitochondrial encephalomyopathy, myoclonic epilepsy myopathy sensory ataxia (MEMSA), myoclonic epilepsy, mitochondrial recessive ataxia syndrome, sensory ataxia neuropathy, dysarthria, ophthalmoplegia, spinocerebellar ataxia, sarcopenia, skeletal muscle atrophy, lactic acidosis, seizures, stroke-like episodes, gray or white matter disease, autonomic dysfunction, cardiac conduction defects, cardiomyopathy, pancreatic exocrine or endocrine dysfunction, skeletal muscle myopathy, peripheral neuropathy, blindness, gastrointestinal dysmotility, deafness, liver failure, and kidney failure;
b) the disease or condition is selected from the group consisting of a neurodegenerative disease, a glucose metabolism disorder, and aging, optionally wherein the neurodegenerative disease is Parkinson's disease or the glucose metabolism disorder is diabetes or obesity;
c) the mitochondrial dysfunction is caused by a defect in at least one component of the respiratory chain; or
d) the cancer is selected from the group consisting of breast cancer, paraganglioma, phaeochromocytoma, leiomyoma, leiomyosarcoma, and renal cell carcinoma.

79-192. (canceled)

193. An isolated polypeptide comprising a water-forming NADPH oxidase or a polynucleotide encoding said water-forming NADPH oxidase, wherein the NADPH oxidase has at least 85% sequence identity to the sequence of SEQ ID NO: 329, and wherein said NADPH oxidase comprises one or more mutations in the dinucleotide-binding motif region (residues 153-158) or the cofactor specific loop region (residues 176-183) of SEQ ID NO: 1.

194. The polypeptide of claim 193, wherein the one or more mutations are selected from the group consisting of G158A, D176A, A177R, M178S, and P183R relative to the amino acid sequence of SEQ ID NO: 1.

195-206. (canceled)

207. A method of analyzing an effect of a water-forming NADH oxidase or water-forming NADPH oxidase on a mammalian cell comprising culturing the mammalian cell of claim 1.

208. The method of claim 207, further comprising contacting said mammalian cell, prior to the culturing, with a polynucleotide comprising a nucleic acid sequence encoding a water-forming NADH oxidase or a water-forming NADPH oxidase, wherein said nucleic acid sequence further comprises a mammalian promoter or a nucleic acid sequence that encodes a cell-penetrating peptide or a peptide that localizes to a particular organelle within a mammalian cell.

209. The method of claim 207 or 208, wherein said method comprises:
a) detecting the presence or activity of said NADH oxidase or NADPH oxidase; and/or
b) determining the absolute or relative concentration of at least one molecule that is produced or released by said mammalian cell as a result of a chemical reaction that occurs during cellular respiration.

210-224. (canceled)

225. A kit for analyzing an effect of water-forming NADH oxidase activity or water-forming NADPH oxidase activity in a mammalian cell or within a specific organelle within said mammalian cell, said kit comprising the polypeptide of claim 38, a polynucleotide encoding the polypeptide, a vector comprising the polynucleotide, or a cell comprising the vector or polynucleotide, and instructions for the use of said kit, optionally wherein said kit comprises a reagent capable of inducing expression of said water-forming NADH oxidase or water-forming NADPH oxidase in said mammalian cell.

226-328. (canceled)

The application's sequence listing, which the Patent Office published only in electronic form, follows.

SEQUENCE LISTING (330 sequences)

SEQ ID NO: 1 - protein, 449 aa, Lactobacillus brevis
KVTVVGCTHAGTFAIKQILAEHPDAEVTVYERNDVISFLSCGIALYLGGKVADPQGLFYSSPEELQKLGANVQMNHNVLAIDPDQKTVTVEDLTNHAQTTESYDKLVMTSGSWPIVPKIPGIDSDRVKLCKNWAHAQALIEDAKEAKRITVIGAGYIGAELAEAYSTTGHDVTLIDAMARVMPKYFDADFTDVIEQDYRDHGVQLALGETVESFTDSATGLTIKTDKNSYETDLAILCIGFRPNTDLLKGKVDMAPNGAIITDDYMRSSNPDIFAAGDSAAVHYNPTHQNAYIPLATNAVRQGILVGKNLVKPTVKYMGTQSSSGLALYDRTIVSTGLTLAAAKQQGLNAEQVIVEDNYRPEFMPSTEPVLMSLVFDPDTHRILGGALMSKYDVSQSANTLSVCIQNENTIDDLAMVDMLFQPNFDRPFNYLNILAQAAQAKVAQSVNA

SEQ ID NO: 2 - protein, 445 aa, Lactococcus lactis
KIVVIGTNHAGIATANTLLEQYPGHEIVMIDRNSNMSYLGCGTAIWVGRQIEKPDELFYAKAEDFEAKGVKILTETEVSEIDFANKKVYAKTKSDDEIIEAYDKLVLATGSRPIIPNLPGKDLKGIHFLKLFQEGQAIDAEFAKEKVKRIAVIGAGYIGTEIAEAAKRRGKEVLLFDAENTSLASYYDEEFAKGMDENLAQHGIELHFGELAKEFKANEEGYVSQIVTNKATYDVDLVINCIGFTANSALASDKLATFKNGAIKVDKHQQSSDPDVYAVGDVATIYSNALQDFTYIALASNAVRSGIVAGHNIGGKELESVGVQGSNGISIFGYNMTSTGLSVKAAKKLGLEVSFSDFEDKQKAWFLHENNDSVKIRIVYETKSRRIIGAQLASKSEIIAGNINMFSLAIQEKKTIDELALLDLFFLPHFNSPYNYMTVAALNAK

SEQ ID NO: 3 - protein, 458 aa, Streptococcus pneumoniae
SKIVVVGANHAGTACINTMLDNFGNENEIVVFDQNSNISFLGCGMALWIGEQIDGAEGLFYSDKEKLEAKGAKVYMNSPVLSIDYDNKVVTAEVEGKEHKESYEKLIFATGSTPILPPIEGVEIVKGNREFKATLENVQFVKLYQNAEEVINKLSDKSQHLDRIAVVGGGYIGVELAEAFERLGKEVVLVDIVDTVLNGYYDKDFTQMMAKNLEDHNIRLALGQTVKAIEGDGKVERLITDKESFDVDMVILAVGFRPNTALADGKIELFRNGAFLVDKKQETSIPGVYAVGDCATVYDNARKDTSYIALASNAVRTGIVGAYNACGHELEGIGVQGSNGISIYGLHMVSTGLTLEKAKAAGYNATETGFNDLQKPEFMKHDNHEVAIKIVFDKDSREILGAQMVSHDIAISMGIHMFSLAIQEHVTIDKLALTDLFFLPHFNKPYNYITMAALTAEK

SEQ ID NO: 4 - protein, 456 aa, Streptococcus mutans
SKIVIVGANHAGTAAINTVLDNYGSENEVVVFDQNSNISFLGCGMALWIGKQISGPQGLFYADKESLEAKGAKIYMESPVTAIDYDAKRVTALVNGQEHVESYEKLILATGSTPILPPIKGAAIKEGSRDFEATLKNLQFVKLYQNAEDVINKLQDKTQNLNRIAVVGAGYIGVELAEAFKRLGKEVILIDVVDTCLAGYYDQDLSEMMRQNLEDHGIELAFGETVKAIEGDGKVERIVTDKASHDVDMVILAVGFRPNTALGNAKLKTFRNGAFLVDKKQETSIPDVYAIGDCATVYDNAINDTNYIALASNALRSGIVAGHNAAGHKLESLGVQGSNGISIFGLNMVSTGLTQEKAKRFGYNPEVTAFTDFQKASFIEHDNYPVTLKIVYDKDSRLVLGAQMASKEDMSMGIHMFSLAIQEKVTIERLALLDYFFLPHFNQPYNYMIKAALKAK

SEQ ID NO: 5 - protein, 451 aa, Serpulina hyodysenteriae
KVIVIGCNHAGTWAAKTLKATDPNCQVVTYDRNDNISFLACGIALWVGGVVKDPKGLFYASPESLRGEGIDVYMGHDVTKIDWANKKLCVKELKTGKEFEDTYDKLILATGSWPVTPPIEGLKQEGTTYGLKKGIFFSKLYQQGQEIIDEIAKPDVKKVMVVGAGYIGVELIEAFKNHGKEVILMEAMPRVMANYFDKEITDEAEKRIKEAGIEMHLGETVKKFEGDDRVKKVVTDKGSYDVDMVVMSVGFRPNNELYKDYLETLPNGAIVVDTTMKTTKDPDVFAIGDCATVYSRASEKQEYIALSTNAVRMGIVAANNALGKHVEYCGTQGSNAICVFGYNMASTGWSEETAKKKGLKVKSNFFKDSERPEFMPTNEDVLVKIIYEEGSRRLLGAQIASKHNHAEAIHAFSLAIQNGMTVDQFALSDFFFLPHYNKPLSWMTMVAYTAK

SEQ ID NO: 6 - protein, 448 aa, Clostridium aminovalericum
MKIVVIGCTHAGTAAVKTILKENPEAEITIFERNDNISFLSCGIALYVGGVVKDPAGLFYSNPEELSKMGANVKIKHNVKSIDTKSKKVIAEDMNTGEEIEVSYDKLVNTTGSWPIIPPIPGIESKNILLCKNYDQANVIIRQTKDAKKIVIVGGGYIGIELVEAFQKSGKQVTLIDGLDRILNKYLDKEFTDILEDDLKKNGINLALDQCVKSFKANENGEVTSVETTKGEYEADMVILCVGFRPNNELLKGKVDMLPNDAIIVDEYMRTSDPDIFAAGDSCAVHYNPNGNYAYIPLATNAVRMGMLIGKNISTPKVKYRGTQSTSGLNLFGYNIGSTGVTVSGAPQIGLNVRSVIVKDNYRPEFMPTNEEIIMQLVYEVGTNRIVGGQVMSKYDITQSANTLSLAIQNKMTIEDLAYVDFFFQPHFDRPWNYLNILGLAALEQEGL

SEQ ID NO: 7 - protein, 463 aa, Clostridium bolteae ATCC BAA-613
MLVIRQDFKFQDSRRLLNMKETIVVIGANHGGTAVLNTILDQFPGNRVVAFDRNSDISFLGCGMALWIGGQISGPEGLFYSSKEAFEEKGAVIHMETEVERIDFDGKAVYARGKDGKSYVQEYDKLILATGSVPLRPEIEGMELDNVQFVKLYQNARDVIEKLKDTSVKKVAVVGAGYIGVELAEAFKRNGREVVLIDLADTCLSGYYDREFSDRMAHNLQEHGVKLAFGEKVVRLEGKRRVERVVTDQGCYEADMVVFGIGFRPNTSLGQGRLRTFGNGAFLVDRRQETSVPGVYAVGDCATVYNNAIQAADYIALATNAVRSGIIAAHNACGKVLESVGVQGSNGISIWGLHMLSTGISLARAKRMGYDAAAADYEDWQKAEFMENGNHKVKIRIVYDRKSRIILGAQMCSDYDVSMGIHMFSMAVEEQVTIDKLKLFDLFFLPHFNKPYNYVTMAALGAE

SEQ ID NO: 8 - protein, 459 aa, Clostridium scindens ATCC 35704
MGAAYCVHGGRYRKVSDRIIVIGANHAGTAALNTILDNYTDKDVTAFDANSNISFLGCGMALWIGRQISGPEGLFYSDKETLEGKGAKVFLETKVSRIDFEKKTVYAMDKEGEEIEANYDKLILATGSLPIQPKVKGMELKNVQFVKLYQNAADVIEKLEDPSIQKVTIIGAGYIGVELAEAFARNGRKTTLVDCADTCLSAYYDPEFCKIMEENLRENGVRTAFGEMVQEIQGQELVERVVTDKDSYDTDMAVFCIGFRPNTQYADGSLELFRNGAFLVDLHQQASRPEVYAIGDCATVFNNATQRKDYIALATNAVRSGIIAAHNACGTPLESAGVQGSNAICIWGLNMVSTGISLKKALELGYEAAAADYEDWQKAGFIESGNEKVRIRIVYDKKTRIVLGAQMCSKYDISMGIHMFSLAIQEQVTIDKLKLLDLFFLPHFNQPYNYITMAALKAE

SEQ ID NO: 9 - protein, 446 aa, Anaerostipes caccae DSM 14662
MPKKIIVIGANHAGTAALNTILDNYKDVDVTAFDANSNISFLGCGMALWIGGQISGPDGLFYSSKEILEGKGAKIYMETSVNSVDFDSKVVYTKDAAGKDCEYPYDKLILATGSTPVGPQLPGMSLENVQFVKLYQNAAEVIEKLGDTSIKKVAVVGAGYIGVELAEAFQRNGREVTLIDCADTCLSAYYDDMFCKRMEKQLSDHGIHLAFEEKVERLEGNEKVEKVVTDKHTYDADMVIFCVGFRPNTKLGNGQLKQFHNNGAYLTDLMQQTSRPDVYAVGDCATVYNNAIEDTDYIALATNAVRSGIIAAHNACGTELKSPGVQGSNGISIWGLNMVSTGLSLERAKKLGFDAAATDYEDWQKAGFMEKDNYKVVIRIVYDKKTRRILGAQLCSDYDISMAIHLFSMAIQEKVTIDKLKLFDLFFLPHFNQPYNYITMAALNAE

SEQ ID NO: 10 - protein, 448 aa, Bifidobacterium animalis subsp. lactis BB-12
MTTTVAVVGCTHAGVFAANSILREHPDWQVHVFERNETVSFLSCGIALWVGGHVSDPKKMFYSSPQALEQAGATVHMHTDVTDVDVAAKTLEFRDLQTGDTQTLPYDKLVVTTGSRPIVPPLPGIDSKRVQLCKNWDDAVQIKERAHDLKNVIVIGAGYIGAELAEQFSTRGTQVTLIDAADRVLANNFDRFITDQVEAKYREHGVTLALGEAVKAFRDNGDSITVVTTKGEYTAPYAVLAVGFRPNTDLVRGQVETLDNGAIVVDEFMRASVPDVFAAGDSATVLFNPTGKLDYIPLATNAVRQGELVGLNIEKPTRKYMGTQATSAVQLYDLSLAASGMTQTYANNHGLDIRSTELLEDYRPAFMLSTAPVSCMLTWDPQTRLVKGAQFCSTTDEVAGAANVVSVAIQAKFTIDMLANVDFLFQPNFDQPVYYVGAVAAKAAAEQR

SEQ ID NO: 11 - protein, 462 aa, Bifidobacterium bifidum
MTTVAIVGCTHAGTFAATSILKQHPDWTVHVFERNDSLSFLSCGIALWVGDHVSDPKRMFYSSPKALAEAGATMHMRHDVLDVDVAGKVLRARDMNTGEVGEYRYDKLVITTGSAPVVPPIDGLDEALESGRVLLCKNWDHAMAIKERAGSAKSAVVIGAGYIGAEIAEQFSEIGVKTTLVDALDRVLANNFDATITDDVEQAFDEHGVTLALGQKVTAFRPAAGSDGIEGSGVTVVTEKGEYTADVAILGAGFRPNTALFADQLRMLKNGAIVIDDYMRASLPDNTVLDDVFAAGDSATVRYNPTGADDYIPLATNAVRQGLLIGENIVAATKRYPGTQATSAVQLYDLAMSATGLTAGGAKRRGIAAKSTTITQDYRPDFMLTTTPVTTTLVWSPVTRRILGAQFLSKHDISQAANVVSVAIQAGFTIDQLAGADLFFQPNFSQPINFVGAVAIQAVAES

SEQ ID NO: 12 - protein, 103 aa, Bifidobacterium bifidum CAG:234
MTTVAIVGCTHAGTFAATSILKQHPDWTIHVFERNDSLSFLSCGIALWVGDHVSDPKRMFYSSPKALAEGPRRRPSPKPAPRCTCATTCSMWMSPARCCAPVT

SEQ ID NO: 13 - protein, 462 aa, Bifidobacterium bifidum PRL2010
MTTVAIVGCTHAGTFAATSILKQHPDWTVHVFERNDSLSFLSCGIALWVGDHVSDPKRMFYSSPKALAEAGATMHMRHDVLDVDVAGKVLRARDMNTGEVGEYRYDKLVITTGSAPVVLPIDGLDEALESGRVLLCKNWDHAMAIKERAGSAKSAVVIGAGYIGAEIAEQFSEIGVKTTLVDALDRVLANNFDATITDDVEQAFDEHGVTLALGQKVTAFRPAAGSDGIEGSGVTVVTEKGEYTADMAILGAGFRPNTALFADQLRMLKNGAIVIDDYMRASLPDNTVLDDVFAAGDSATVRYNPTGADDYIPLATNAVRQGLLIGENIVAATKRYPGTQATSAVQLYDLAMSATGLTAGGAKRRGIAAKSTTITQDYRPDFMLTTTPVTTTLVWSPVTRRILGAQFLSKHDISQAANVVSVAIQAGFTIDQLAGADLFFQPNFSQPINFVGAVAIQAVAES

SEQ ID NO: 14 - protein, 448 aa, Bifidobacterium breve
MTTVAVIGCTHAGTFAATSILAEHPDWTVHVFERNGTLSFLSCGIALWVGDHVSDPKKMFYSSPAALAEAGATMHMRTDVTDVDLDAKTLTYRSLEDGDAATEQTLAFDKLVVTTGSRPVIPPIPGIDSPHVLLCKNWDHAIAIKEKAKTAKSAVVIGSGYIGAEIAEQFSVTGVKTTLVDGLDRPLANNFDKTITDQVAAAFEEHGVTLALGQKVVEFHDNDDNTVTVVTEKGEYTAEMAILAVGFLPNTGLLKGKVDMLPNGAIVVDDYMQASVPDVYAAGDSATVFYNPTGQHDYIPLATNAVRQGLLVGRNIEAPTVKYLGTQATSAVQLYDLSLAASGLTRAGAERRGLTVHETSLTEDYRPDFMLTTTPVTSILTWDPETRKVKGGQFCSKADISGAANVISMAIQAGFTIDQLANVDFLFQPNFDKPVYYVGAVAMKAAAE

SEQ ID NO: 15 - protein, 448 aa, Bifidobacterium breve 12L; identical to SEQ ID NO: 14

SEQ ID NO: 16 - protein, 448 aa, Bifidobacterium breve 2L; identical to SEQ ID NO: 14

SEQ ID NO: 17 - protein, 448 aa, Bifidobacterium breve 31L; identical to SEQ ID NO: 14

SEQ ID NO: 18 - protein, 448 aa, Bifidobacterium breve 689b
MTTVAVIGCTHAGTFATTSILAEHPDWTVHVFERNGTLSFLSCGIALWVGDHVSDPKKMFYSSPAALAEAGATMHMRTDVTDVDLDAKTLTYRSLEDGDAATEQTLAFDKLVVTTGSRPVIPPIPGIDSPHVLLCKNWDHAIAIKEKAKTAKSAVVIGSGYIGAEIAEQFSVTGVKTTLVDGLDRPLANNFDKTITDQVAAAFEEHGVTLALGQKVVEFHDNDDNTVTVVTEKGEYTAEMAILAVGFLPNTGLLKGKVDMLPNGAIVVDDYMQASVPDVYAAGDSATVFYNPTGQHDYIPLATNAVRQGLLVGRNIEAPTVKYLGTQATSAVQLYDLSLAASGLTRAGAERRGLTVHETSLTEDYRPDFMLTTTPVTSILTWDPETRKVKGGQFCSKADISGAANVISMAIQAGFTIDQLANVDFLFQPNFDKPVYYVGAVAMKAAAE

SEQ ID NO: 19 - protein, 448 aa, Bifidobacterium breve JCM 7017
MTTVAVIGCTHAGTFAATSILAEHPDWTVHVFERNGTLSFLSCGIALWVGDHVSDPKKMFYSSPAALAEAGATMHMRTDVTDVNLDTKTITYRSLEDGDDAPEQTLAFDKLVVTTGSRPVIPPIPGIDSPHVLLCKNWDHAIAIKEKAKTAKSAVVIGSGYIGAEIAEQFSVTGVKTTLVDGLDRPLANNFDKTITDQVAAAFEEHGVTLALGQKVVEFHDNDDNTVTVVTEKGEYTAEMAILAVGFLPNTDLLKGKVDMLPNGAIVVDDYMQASVPDVYAAGDSATVFYNPTGQHDYIPLATNAVRQGLLVGRNIEAPTMKYLGTQATSAVQLYDLSLAASGLTRAGAERRGLTVHETSLTEDYRPDFMLTTTPVTSILTWDPETRKVKGGQFCSKADISGAANVISMAIQAGFTIDQLANVDFLFQPNFDKPVYYVGAVAMKAAAE

SEQ ID NO: 20 - protein, 448 aa, Bifidobacterium breve JCM 7019; identical to SEQ ID NO: 14

SEQ ID NO: 21 - protein, 448 aa, Bifidobacterium breve NCFB 2258
MTTVAVIGCTHAGTFAATSILAEHPDWTVHVFERNGTLSFLSCGIALWVGDHVSDPKKMFYSSPAALAEAGATMHMRTDVTDVNLDTKTITYRSLEDGDDAPEQTLAFDKLVVTTGSRPVIPPIPGIDSPHVLLCKNWDHAIAIKEKAKTAKSAVVIGSGYIGAEIAEQFSVTGVKTTLVDGLDRPLANNFDKTITDQVAAAFEEHGVTLALGQKVVEFHDNDDNTVTVVTEKGEYTAEMAILAVGFLPNTDLLKGKVDMLPNGAIVVDDYMQASVPDVYAAGDSATVFYNPTGQHDYIPLATNAVRQGLLVGRNIEAPTVKYLGTQATSAVQLYDLSLAASGLTRAGAERRGLTVHETSLTEDYRPDFMLTTTPVTSILTWDPETRKVKGGQFCSKADISGAANVISMAIQAGFTIDQLANVDFLFQPNFDKPVYYVGAVAMKAAAE

SEQ ID NO: 22 - protein, 448 aa, Bifidobacterium breve S27; identical to SEQ ID NO: 14

SEQ ID NO: 23 - protein, 448 aa, Bifidobacterium breve UCC2003; identical to SEQ ID NO: 14

SEQ ID NO: 24 - protein, 453 aa, Enterococcus faecalis CBRD01
MKEGIYNMKVVVVGCTHAGTSAVKSILANHPEAEVTVYERNDNISFLSCGIALYVGGVVKNAADLFYSNPEELASLGATVKMEHNVEEINVDDKTVTAKNLQTGATETVSYDKLVMTTGSWPIIPPIPGIDAENILLCKNYSQANVIIEKAKDAKRVVVVGGGYIGIELVEAFVESGKQVTLVDGLDRILNKYLDKPFTDVLEKELVDRGVNLALGENVQQFVADEQGKVAKVITPSQEFEADMVIMCVGFRPNTELLKDKVDMLPNGAIEVNEYMQTSNPDIFAAGDSAVVHYNPSQTKNYIPLATNAVRQGMLVGRNLTEQKLAYRGTQGTSGLYLFGWKIGSTGVTKESAKLNGLDVEATVFEDNYRPEFMPTTEKVLMELVYEKGTQRIVGGQLMSKYDITQSANTLSLAVQNKMTVEDLAISDFFFQPHFDRPWNYLNLLAQAALENM

SEQ ID NO: 25 - protein, 446 aa, Lactococcus lactis subsp. cremoris UC509.9
MKIVVIGTNHAGIATANTLLEQYPGHEIVMIDRNSNMSYLGCGTAIWVGRQIEKPDELFYAKAEDFEAKGVKILTETEVSEIDFANKKVYAKTKSDDEIIEAYDKLVLATGSRPIIPNLPGKDLKGIHFLKLFQEGQAIDAEFTKEKVKRIAVIGAGYIGTEIAEAAKRRGKEVLLFDAENTSLASYYDEEFAKGMDENLAQHGIELHFGELAKEFKANEEGYVSQIVTNKATYDVDLVINCIGFTAYSALASDKLATFKNGAIKVDKHQQSSDPDVYAVGDVATIYSNALQDFTYIALASNAVRSGIVAGHNIGGKELESVGVQGSNGISIFGYNMTSTGLSVKAAKKLGLEVSFSDFEDKQKAWFLHENNDSVKIRIVYETNSRRIIGAQLASKSEIIAGNINMFSLAIQEKKTIDELALLDLFFLPHFNSPYNYMTVAALNAK

SEQ ID NO: 26 - protein, 446 aa, Lactococcus lactis subsp. lactis KF147
MKIVVIGTNHAGIATANTLIDQYPGHEIVMIDRNSNMSYLGCGTAIWVGRQIEKPDELFYAKAEDFEKKGVKILTETEVSEIDFTNKMIYAKSKTGEKITESYDKLVLATGSRPIIPNLPGKDLKGIHFLKLFQEGQAIDEEFAKNDVKRIAVIGAGYIGTEIAEAAKRRGKEVLLFDAESTSLASYYDEEFAKGMDENLAQHGIELHFGELAQEFKANEEGHVSQIVTNKSTYDVDLVINCIGFTANSALAGEHLETFKNGAIKVNKHQQSSDPDVYAVGDVATIYSNALQDFTYIALASNAVRSGIVAGHNIGGKSIESVGVQGSNGISIFGYNMTSTGLSVKAAKKIGLEVSFSDFEDKQKAWFLHENNDSVKIRIVYETKSRRIIGAQLASKSEIIAGNINMFSLAIQEKKTIDELALLDLFFLPHFNSPYNYMTVAALNAK

SEQ ID NO: 27 - protein, 305 aa, Oribacterium sinus
EFKKVCVLGGGYIGVELAEAFQRLGLEVTLIDMVDRILAGYFDAPFSDELKNRMEEHGIKLALGEKVEEFLGEGKVSGVKTDKGVYDADMVICAVGFRPNASLGADHLKLYQNGAYLVNRKQQTSDPSVYAIGDCASLYDNARGRENYIALATNAVRSGVVAGHNICGTPVESLGVQGSSALGIYGYKLACTGLSLAAAEREGMDVSYEDYEDTQFPAFMEVENPKVKIRIVYKKEDKKIVGCQLGSSYDATAIIHFFSLAIQKGLTMPELPLVDLFFMPHFNQPYNYVTRTGLNWLNKELGLKG

SEQ ID NO: 28 - protein, 436 aa, Streptococcus equi subsp. zooepidemicus MGCS10565
MLTNYGDANEIVVFDQNSNISFLGCGMALWIGEQISGPEGLFYSNKEELESLGAKVYMESPVQSIDYDAKTVTALVDGKEHVESYDKLIFATGSQPILPPIKGAEIKEGSLEFEATLENLQFVKLYQNSADVISKLENKDIKRVAVVGAGYIGVELAEAFQRKGKEVILIDVADTCLAGYYDRDLTDVMSKNLEEHGIQLAFGETVKEVAGDGKVEKLITDKNEYDVDMVILAVGFRPNTALGAGKIELFRNGAFLVNKHQETSIPGIYAIGDCATIYDNATRDTNYIALASNAVRTGIVAAHNACGTALEGIGVQGSNGISIYGLHMVSTGLTLEKAKCLGFDAAVTEYTDNQKPEFIEHGNFQVTIKIVYDKESRRILGAQMASHEDISMGIHMFSLAIQEGVTIEKLALTDIFFLPHFNKPYNYITMAALGAE

SEQ ID NO: 29 - protein, 455 aa, Streptococcus infantarius subsp. infantarius ATCC BAA-102
MSKIVVIGANHAGTACIKTMLTNYGSENEVVVFDQNSNISFLGCGMALWIGQQISGPEGLFYSNKEELEQLGARIYMNSPVESVDYDKKLVTALVDGKPHLESYDKLIFATGSRPIIPPIKGVELKEDSQEFEAKLENIQFVKLYQNAQDVIEKLKEKEISRVAVVGAGYIGVELAEAFQRKGKEVTLIDVADTCLAGYYDEDLSAIMANNLQAHGIKLAFGETVKEVVGKTKVEKIITDKASYNVDMVILAVGFRPNTSLAAGKVELFKNGAFLVDKKQETSLPGVYAIGDCATIYNNASCETDYIALASNAVRTGIVAAHNACGHNLEGIGVQGSNGISIYGLNMLSTGLTLEKAKIKGFDAEEVEYSDKQKPDFIEKNNFEVTLKIVYDKESRRVLGAQMLAMADISLGIHLFSLAIQEGVTIDKLALTDLFFLPHFNKPYNYITMAALNAE

SEQ ID NO: 30 - protein, 455 aa, Streptococcus macedonicus ACA-DC 198
MSKIVVIGANHAGTACIKTMLTNYGTENEVVVFDQNSNISFLGCGMALWIGEQIAGPEGLFYSDKDELEQLGAKVYMNSPVESIDYDKKEITALVDGQKHFETYDKLILATGSQPIIPPIKGVSMKEDSLEFESKLENVQFVKLYQNAEDVIERLKEKAISRVAVVGAGYIGVELAEAFQRKGKEVTLIDVAETCLAGYYDRDLSDAMANNLQEHGIHLAFGEAVQEIVGKTKVEKIITDKSEYDVDMVILAVGFRPNTALAQDKIKLFSNGAFLVDKYQETSMPDVYAIGDCATIYNNATQSTDYIALASNAVRTGIVAAHNACGHKLEGVGVQGSNGISIYGLNMVSTGLTLEKAKAKGFDALEVEYVDNQKPEFIQKDNFQVTLKIVYDKTSRVILGAQIMAKKDISMGIHLFSLAIQEQVTIDKLALTDLFFLPHFNKPYNYITMAALNAK

SEQ ID NO: 31 - protein, 459 aa, Streptococcus mitis
MSKIVVVGANHAGTACINTMLDNFGNENEIVVFDQNSNISFLGCGMALWIGEQIDGAEGLFYSDKEKLEAKGAKVYMNSPVLSIDYDNKVVTAEVEGKEHKESYEKLIFATGSTPILPPIEGVEIVKGNREFKATLENVQFVKLYQNAEEVIHKLSDKSQHLDRIAVVGGGYIGVELAEAFERLGKEVVLVDIVDTVLNGYYDKDFTQMMAKNLEDHNIRLALGQTVKAIEGDGKVERLITDKETFDVDMVILAVGFRPNTALADGKIELFRNGAFLVDKKQETSIPGVYAVGDCATVYDNARKDTSYIALASNAVRTGIVGAYNACGHELEGIGVQGSNGISIYGLHMVSTGLTLEKAKAAGYNATETGFNDLQKPEFMKHDNHEVAIKIVFDKDSREILGAQMVSRDSAISMGIHMFSLAIQEHVTIDKLALTDLFFLPHFNKPYNYITMAALTAEK

SEQ ID NO: 32 - protein, 459 aa, Streptococcus mitis SK321
MSKIVVVGANHAGTACINTMLDNFGNENEIVVFDQNSNISFLGCGMALWIGEQIDGAEGLFYSDKEKLEAKGAKVYMNSPVLSIDYDKKVVTAEVEGKEHKESYEKLIFATGSTPILPPIEGVEIVKGNREFKATLENVQFVKLYQNAEEVIHKLADKSQHLDRIAVVGGGYIGVELAEAFERLGKEVVLVDIVDTVLNGYYDKDFTQMMAKNLEDHNIRLALGQTVKAIEGDGKVERLITDKETFDVDMVILAVGFRPNTTLADGKIELFRNGAFLVNKKQETSLPGVFAVGDCATVYDNARKDTSYIALASNAVRTGIVGAYNACGHELEGIGVQGSNGISIYGLHMVSTGLTLEKAKAAGYNATETGFNDLQKPEFMKHDNHEVAIKIVFDKDSREILGAQMVSHDPAISMGIHMFSLAIQEHVTIDKLALTDLFFLPHFNKPYNYITMAALTAEK

SEQ ID NO: 33 - protein, 459 aa, Streptococcus mitis SK564
MSKIVVVGANHAGTACINTMLDNFGNENEIVVFDQNSNISFLGCGMALWIGEQIDGAEGLFYSDKEKLEAKGAKVYMNSPVLSIDYDNKVVTAEVEGKEHKESYEKLIFATGSTPILPPIEGVEIVKGNREFKATLENVQFVKLYQNAEEVINKLADKSKHLDRIAVVGGGYIGVELAEAFERLGKEVVLVDIVDTVLNGYYDKDFTKMMAKNLEDHNIRLALGQTVKAIEGDGKVERLITDKETFDVDMVILAVGFRPNTALADGKIELFRNGAFLVDKKQETSIPGVFAVGDCATVYDNARKETSYIALASNAVRTGIVGAYNACGHELEGIGVQGSNGISIYGLHMVSTGLTLEKAKAAGYNATETGFNDLQKPEFMKHDNHEVAIKIVFDKDSREILGAQMVSRDAAISMGIHMFSLAIQEHVTIDKLALTDLFFLPHFNKPYNYITMAALTAEK

SEQ ID NO: 34 - protein, 459 aa, Streptococcus mitis SK597
MSKIVVVGANHAGTACINTMLDNFGNENEIVVFDQNSNISFLGCGMALWIGEQIDGAEGLFYSDKEKLEAKGAKVYMNSPVLSIDYDNKVVTAEVEGKEHKESYEKLIFATGSTPILPPIDGVEIVKGNREFKATLENVQFVKLYQNAEEVIHKLSDKSQHLDRIAVVGGGYIGVELAEAFERLGKEVILVDIVDTVLNGYYDKDFTQMMAKNLEDHNIRLALGQTVKAIEGDGKVERLITDKETFDVDMVILAVGFRPNTALADGKIELFRNGAFLVDKKQETSLPGVFAVGDCATVYDNARKDTSYIALASNAVRTGIVGAYNACGHELEGIGVQGSNGISIYGLHMVSTGLTLEKAKAAGYNATETGFNDLQKPEFMKHDNHEVAIKIVFDKDSREILGAQMVSRDSAISMGIHMFSLAIQEHVTIDKLALTDLFFLPHFNKPYNYITMAALTAEK

SEQ ID NO: 35 - protein, 457 aa, Streptococcus mutans 11A1
MSKIVIVGANHAGTAAINTILDNYGSENEVVVFDQNSNISFLGCGMALWIGKQISGPQGLFYADKESLEAKGAKIYMESPVTAIDYDAKRVTALVNGQEHVESYEKLILATGSTPILPPIKGAAIKEGSRDFEATLKNLQFVKLYQNAEDVINKLQDKTQNLNRIAVVGAGYIGVELAEAFKRLGKEVILIDVVDTCLAGYYDQDLSEMMRQNLEDHGIELAFGETVKAIEGDGKVERIVTDKASHDVDMVILAVGFRPNTALGNAKLKTFRNGAFLVDKKQETSIPDVYAIGDCATVYDNAINDTNYIALASNALRSGIVAGHNAAGHKLESLGVQGSNGISIFGLNMVSTGLTQEKAKRFGYNPEVTAFTDFQKASFIEHDNYPVTLKIVYDKDSRLVLGAQMASKEDMSMGIHMFSLAIQEKVTIERLALLDYFFLPHFNQPYNYMIKAALKAK

SEQ ID NO: 36 - protein, 457 aa, Streptococcus mutans 11SSST2
MSKIVIVGANHAGTAAINTVLDNYGSENEVVVFDQNSNISFLGCGMALWIGKQISGPQGLFYADKESLEAKGAKIYMESPVTAIDYDAKRVTALVNGQEHVESYEKLILATGSTPILPPIKGAAIKEGSCDFEATLKNLQFVKLYQNAEDVINKLQDKRQNLNRIAVVGAGYIGVELAEAFKRLGKEVILIDVVDTCLAGYYDQDLSEMMRQNLEDHGIELAFGETVKAIEGDGKVERIVTDKASHDVDMVILAVGFRPNTALGNAKLKTFRNGAFLVDKKQETSIPDVYAIGDCATVYDNAINDTNYIALASNALRSGIVAGHNAAGHKLESLGVQGSNGISIFGLNMVSTGLTQEKAKRFGYNPEVTAFTDFQKASFIEHDNYPVTLKIVYDKDSRLVLGAQMASKEDMSMGIHMFSLAIQEKVTIERLALLDYFFLPHFNQPYNYMTKAALKAK

SEQ ID NO: 37 - protein, 457 aa, Streptococcus mutans 11VS1
MSKIVIVGANHAGTAAINTVLDNYGSENEVVVFDQNSNISFLGCGMALWIGKQISGPQGLFYADKESLEAKGAKIYMESPVTAIDYDAKRVTALVNGQEHVESYEKLILATGSTPILPPIKGAAIKEGSRDFEATLKNLQFVKLYQNAEDVINKLQDKTQNLNRIAVVGAGYIGVELAEAFKRLGKEVILIDIVDTCLAGYYDQDLSEMMRQNLEDHGIELAFGETVKAIEGDGKVERIVTDKASHDVDMVILAVGFRPNTALGNAKLKTFRNGAFLVDKKQETSIPDVYAIGDCATVYDNAINDTNYIALASNALRSGIVAGHNAAGHKLESLGVQGSNGISIFGLNMVSTGLTQEKAKRFGYNPEVTAFTDFQKASFIEHDNYPVTLKIVYDKDSRLVLGAQMASKEDMSMGIHMFSLAIQEKVTIERLALLDYFFLPHFNQPYNYMIKAALKAK

SEQ ID NO: 38 - protein, 457 aa, Streptococcus mutans 14D
MSKIVIVGANHAGTAAINTVLDNYGSENEVVVFDQNSNISFLGCGMALWIGKQISGPQGLFYADKESLEAKGAKIYMESPVTAIDYDAKRVTALVNGQEHVESYEKLILATGSTPILPPIKGAAIKEGSRDFEATLKNLQFVKLYQNAEDVINKLQDKTQNLNRIAVVGAGYIGVELAEAFKRLGKEVILIDVVDTCLAGYYDQDLSEMMRQNLEDHGIELAFGETVKAIEGDGKVERIVTDKASHDVDMVILAVGFRPNTALGNAKLKTFRNGAFLVDKKQETSIPDVYAIGDCATVYDNAINDTNYIALASNALRSGIVAGHNAAGHKLESLGVQGSNGISIFGLNMVSTGLTQEKAKRFGYNPEVTAFTDFQKASFIEHDNYPVTLKIVYDKDSRLVLGAQMASKEDMSMGIHMFSLAIQEKVTIERLALLDYFFLPHFNQPYNYMIKAALKAK

SEQ ID NO: 39 - protein, 457 aa, Streptococcus mutans 15JP3
MSKIVIVGANHAGTAAINTVLDNYGSENEVVVFDQNSNISFLGCGMALWIGKQISGPQGLFYADKESLEAKGAKIYMESPVTAIDYDAKRVTALVNSQEHVESYEKLILATGSTPILPPIKGAAIKEGSRDFEATLKNLQFVKLYQNAEDVINKLQDKTQNLNRIAVVGAGYIGVELAEAFKRLGKEVILIDVVDTCLAGYYDQDLSEMMRQNLEDHGIELAFGETVKAIEGDGKVERIVTDKASHDVDMVILAVGFRPNTALGNAKLKTFRNGAFLVDKKQETSIPDVYAIGDCATVYDNAINDTNYIALASNALRSGIVAGHNAAGHKLESLGVQGSNGISIFGLNMVSTGLTQEKAKRFGYNPEVTAFTDFQKASFIEHDNYPVTLKIVYDKDSRLVLGAQMASKEDMSMGIHMFSLAIQEKVTIERLALLDYFFLPHFNQPYNYMIKAALKAK

SEQ ID NO: 40 - protein, 457 aa, Streptococcus mutans 15VF2; identical to SEQ ID NO: 38

SEQ ID NO: 41 - protein, 457 aa, Streptococcus mutans 1ID3
MSKIVIVGANHAGTAAINTILDNYGSENEVVVFDQNSNISFLGCGMALWIGKQISGPQGLFYADKESLEAKGAKIYMESPVIAIDYDAKRVTALVNGQEHVESYEKLILATGSTPILPPIKGAAIKEGSRDFEATLKNLQFVKLYQNAKDVINKLQDKSQNLNRIAVVGAGYIGVELAEAFKRLGKEVILIDVVDTCLAGYYDQDLSEMMRQNLEDHGIELAFGETVKAIEGDGKVERIVTDKASHDVDMVILAVGFRPNTALGNAKLKTFRNGAFLVDKKQETSIPDVYAIGDCATVYDNAINDTNYIALASNALRSGIVAGHNAAGHKLESLGVQGSNGISIFGLNMVSTGLTQEKAKRFGYNPEVTAFTDFQKASFIEHDNYPVTLKIVYDKDSRLVLGAQMASKEDMSMGIHMFSLAIQEKVTIERLALLDYFFLPHFNQPYNYMTKAALKAK

SEQ ID NO: 42 - protein, 457 aa, Streptococcus mutans 1SM1
MSKIVIVGANHAGTAAINTILDNYGSENEVVVFDQNSNISFLGCGMALWIGKQISGPQGLFYADKESLEAKGAKIYMESPVTAIDYDAKRVTALVNGQEHVESYEKLILATGSTPILPPIKGAAIKEGSRDFEATLKNLQFVKLYQNAEDVINKLQDKTQNLNRIAVVGAGYIGVELAEAFKRLGKEVILIDVVDTCLAGYYDQDLSEMMRQNLEDHGIELAFGETVKAIEGDGKVERIVTDKVSHDVDMVILAVGFRPNTALGNAKLKTFRNGAFLVDKKQETSIPDVYAIGDCATVYDNAINDTNYIALASNALRSGIVAGHNAAGHKLESLGVQGSNGISIFGLNMVSTGLTQEKAKRFGYNPEVTAFTDFQKASFIEHDNYPVTLKIVYDKDSRLVLGAQMASKEDMSMGIHMFSLAIQEKVTIERLALLDYFFLPHFNQPYNYMIKAALKAK

SEQ ID NO: 43 - protein, 457 aa, Streptococcus mutans 21
MSKIVIVGANHAGTAAINTILDNYGSENEVVVFDQNSNISFLGCGMALWIGKQISGPQGLFYADKESLEAKGAKIYMESPVTAIDYDAKRVTALVNGQEHVESYEKLILATGSTPILPPIKGAAIKEGSRDFEATLKNLQFVKLYQNAEDVINKLQDKSQNLNRIAVVGAGYIGVELAEAFKRLGKEVILIDVVDTCLAGYYDQDLSEMMRQNLEDHGIELAFGETVKAIEGDGKVERIVTDKASHDVDMVILAVGFRPNTALGNAKLKTFRNGAFLVDKKQETSIPDVYAIGDCATVYDNAINDTNYIALASNALRSGIVAGHNAAGHKLESLGVQGSNGISIFGLNMVSTGLTQEKAKRFGYNPEVTAFTDFQKASFIEHDNYPVTLKIVYDKDSRLVLGAQMASKEDMSMGIHMFSLAIQEKVTIERLALLDYFFLPHFNQPYNYMTKAALKAK

SEQ ID NO: 44 - protein, 457 aa, Streptococcus mutans 24
MSKIVIVGANHAGTAAINTILDNYSSENEVVVFDQNSNISFLGCGMALWIGKQISGPQGLFYADKESLEAKGAKIYMESPVTAIDYDAKRVTALVNGQEHVESYEKLILATGSTPILPPIKGAAIKEGSRDFEATLKNLQFVKLYQNAEDVINKLQDKTQNLNRIAVVGAGYIGVELAEAFKRLGKEVILIDVVDTCLAGYYDQDLSEMMRQNLEDHGIELAFGETVKAIEGDGKVERIVTDKASHDVDMVILAVGFRPNTALGNAKLKTFRNGAFLVDKKQETSIPDVYAIGDCATVYDNAINDTNYIALASNALRSGIVAGHNAAGHKLESLGVQGSNGISIFGLNMVSTGLTQEKAKRFGYNPEVTAFTDFQKASFIEHDNYPVTLKIVYDKDSRLVLGAQMASKEDMSMGIHMFSLAIQEKVTIERLALLDYFFLPHFNQPYNYMIKAALKAK

SEQ ID NO: 45 - protein, 457 aa, Streptococcus mutans 2ST1; identical to SEQ ID NO: 43

SEQ ID NO: 46 - protein, 457 aa, Streptococcus mutans 2VS1; identical to SEQ ID NO: 38

SEQ ID NO: 47 - protein, 457 aa, Streptococcus mutans 3SN1
MSKIVIVGANHAGTAAINTILDNYGSENEVVVFDQNSNISFLGCGMALWIGKQISGPQGLFYADKESLEAKGAKIYMESPVTAIDYDAKRVTALVNGQEHVESYEKLILATGSTPILPPIKGAAIKEGSRDFEATLKNLQFVKLYQNAEDVINKLQDKSQNLNRIAVVGAGYIGVELAEAFKRLGKEVILIDVVDTCLAGYYDQDLSEMMRQNLEDHGIELAFGETVKAIEGNGKVERIVTDKASHDVDMVILAVGFRPNTALGNAKLKTFRNGAFLVDKKQETSIPDVYAIGDCATVYDNAINDTNYIALASNALRSGIVAGHNAAGHKLESLGVQGSNGISIFGLNMVSTGLTQEKAKRFGYNPEVTAFTDFQKASFIEHDNYPVTLKIVYDKDSRLVLGAQMASKEDMSMGIHMFSLAIQEKVTIERLALLDYFFLPHFNQPYNYMIKAALKAK

SEQ ID NO: 48 - protein, 457 aa, Streptococcus mutans 4SM1
MSKIVIVGANHAGTAAINTVLDNYGSENEVVVFDQNSNISFLGCGMALWIGKQISGPQGLFYADKESLEAKGAKIYMESPVTAIDYDAKRVTALVNGQEHVESYEKLILATGSTPILPPIKGAAIKEGSRDFEATLKNLQFVKLYQNAEDVINKLQDKTQNLNRIAVVGAGYIGVELAEAFKRLGKEVILIDVVDTCLAGYYDQDLSEMMRQNLEDHGIELAFGETVKAIEGDGKVERIVTDKASHDVDMVILAVGFRPNTALGNVKLKTFRNGAFLVDKKQETSIPDVYAIGDCATVYDNAINDTNYIALASNALRSGIVAGHNAAGHKLESLGVQGSNGISIFGLNMVSTGLTQEKAKRFGYNPEVTAFTDFQKASFIEHDNYPVTLKIVYDKDSRLVLGAQMASKEDMSMGIHMFSLAIQEKVTIERLALLDYFFLPHFNQPYNYMIKAALKAK

SEQ ID NO: 49 - protein, 457 aa, Streptococcus mutans 4VF1
MSKIVIVGANHAGTAAINTILDNYGSENEVVVFDQNSNISFLGCGMALWIGKQISGPQGLFYADKESLEAKGAKIYMESPVTAIDYDAKRVTALVNGQEHVESYEKLILATGSTPILPPIKGAAIKEGSRDFEATLKNLQFVKLYQNAEDVINKLQDKSQNLNRIAVVGAGYIGVELAEAFKRLGKEVILIDVVDTCLAGYYDQDLSEMMRQNLEDHGIELAFGETVKAIEGDGKVERIVTDKASHDVDMVILAVGFRPNTALGNAKLKTFRNGAFLVDKKQETSIPDVYAIGDCATVYDNAINDTNYIALASNALRSGIVAGHNAAGHKLESLGVQGSNGISIFGLNMVSTGLTQEKAKRFGYNPEVTAFTDFQKASFIEHDNYPVTLKIVYDKDSRLVLGAQMASKEDMSMGIHMFSLAIQEKVTIERLALLDYFFLPHFNQPYNYMIKAALKAK

SEQ ID NO: 50 - protein, 457 aa, Streptococcus mutans 5DC8
MSKIVIVGANHAGTAAINTVLDNYGSENEIVVFDQNSNISFLGCGMALWIGKQISGPQGLFYADKESLEAKGAKIYMESPVTAIDYDAKRVTALVNGQEHVESYEKLILATGSTPILPPIKGAAIKEGSCDFEATLKNLQFVKLYQNAEDVINKLQDKSQNLNRIAVVGAGYIGVELAEAFKRLGKEVILIDVVDTCLAGYYDQDLSEMMRQNLEDHGIELAFGETVKAIEGDGKVERIVTDKASHDVDMVILAVGFRPNTALGNAKLKTFRNGAFLVDKKQETSIPDVYAIGDCATVYDNAINDTNYIALASNALRSGIVAGHNAAGHKLESLGVQGSNGISIFGLNMVSTGLTQEKAKRFGYNPEVTAFTDFQKASFIEHDNYPVTLKIVYDKDSRLVLGAQMASKEDMSMGIHMFSLAIQEKVTIERLALLDYFFLPHFNQPYNYMIKAALKAK

SEQ ID NO: 51 - protein, 457 aa, Streptococcus mutans 5SM3
MSKIVIVGANHAGTAAINTVLDNYGSENEVVVFDQNSNISFLGCGMALWIGKQISGPQGLFYADKESLEAKGAKIYMESPVTAIDYDAKRVTALVNGQEHVESYEKLILATGSTPILPPIKGAAIKEGSCDFEATLKNLQFVKLYQNAEDVINKLQDKSQNLNRIAVVGAGYIGVELAEAFKRLGKEVILIDVVDTCLAGYYDQDLSEMMRQNLEDHGIELAFGETVKAIEGDGKVERIVTDKASHDVDMVILAVGFRPNTALGNAKLKTFRNGAFLVDKKQETSIPDVYAIGDCATVYDNAINDTNYIALASNALRSGIVAGHNAAGHKLESLGVQGSNGISIFGLNMVSTGLTQEKAKRFGYNPEVTAFTDFQKASFIEHDNYPVTLKIVYDKDSRLVLGAQMASKEDMSMGIHMFSLAIQEKVTIERLALLDYFFLPHFNQPYNYMIKAALKAK

SEQ ID NO: 52 - protein, 457 aa, Streptococcus mutans 66-2A; identical to SEQ ID NO: 51

SEQ ID NO: 53 - protein, 457 aa, Streptococcus mutans 8ID3; identical to SEQ ID NO: 43

SEQ ID NO: 54 - protein, 457 aa, Streptococcus mutans A19; identical to SEQ ID NO: 49

SEQ ID NO: 55 - protein, 457 aa, Streptococcus mutans A9
MSKIVIVGANHAGTAAINTVLDNYGSENEIVVFDQNSNISFLGCGMALWIGKQISGPQGLFYADKESLEAKGAKIYMESPVTAIDYDAKRVTALVNGQEHVESYEKLILATGSTPILPPIKGAAIKEGSCDFEATLKNLQFVKLYQNAEDVINKLQDKSQNLNRIAVVGAGYIGVELAEAFKRLGKEVILIDVVDTCLAGYYDQDLSEMMRQNLEDHGIELAFGETVKAIEGDGKVERIITDKASHDVDMVILAVGFRPNTALGNAKLKTFRNGAFLVDKKQETSIPDVYAIGDCATVYDNAINDTNYIALASNALRSGIVAGHNAAGHKLESLGVQGSNGISIFGLNMVSTGLTQEKAKRFGYNPEVTAFTDFQKASFIEHDNYPVTLKIVYDKDSRLVLGAQMASKEDMSMGIHMFSLAIQEKVTIERLALLDYFFLPHFNQPYNYMIKAALKAK

SEQ ID NO: 56 - protein, 457 aa, Streptococcus mutans AC4446; identical to SEQ ID NO: 38

SEQ ID NO: 57 - protein, 457 aa, Streptococcus mutans ATCC 25175; identical to SEQ ID NO: 49

SEQ ID NO: 58 - protein, 457 aa, Streptococcus mutans B; identical to SEQ ID NO: 38

SEQ ID NO: 59 - protein, 457 aa, Streptococcus mutans G123; identical to SEQ ID NO: 38

SEQ ID NO: 60 - protein, 457 aa, Streptococcus mutans GS-5; identical to SEQ ID NO: 49

SEQ ID NO: 61 - protein, 457 aa, Streptococcus mutans KK21; identical to SEQ ID NO: 43

SEQ ID NO: 62 - protein, 457 aa, Streptococcus mutans KK23; identical to SEQ ID NO: 44

SEQ ID NO: 63 - protein, 457 aa, Streptococcus mutans LJ23; identical to SEQ ID NO: 43

SEQ ID NO: 64 - protein, 457 aa, Streptococcus mutans M21
MSKIVIVGANHAGTAAINTVLDNYGSENEVVVFDQNSNISFLGCGMALWIGKQISGPQGLFYADKESLEAKGAKIYMESPVTAIDYDAKRVTALVNGQEHVESYEKLILATGSTPILPPIKGAAIKEGSCDFEATLKNLQFVKLYQNAEDVINKLQDKRQNLNRIAVVGAGYIGVELAEAFKRLGKEVILIDVVDTCLAGYYDQDLSEMMRQNLEDHGIELAFGETVKAIEGDGKVERIVTDKASHDVDMVILAVGFRPNTALGNAKLKTFRNGAFLVDKKQETSIPDVYAIGDCATVYDNAINDTNYIALASNALRSGIVAGHNAAGHKLESLGVQGSNGISIFGLNMVSTGLTQEKAKRFGYNPEVTAFTDFQKASFIEHDNYPVTLKIVYDKDSRLVLGAQMASKEDMSMGIHMFSLAIQEKVTIERLALLDYFFLPHFNQPYNYMIKAALKAK

SEQ ID NO: 65 - protein, 457 aa, Streptococcus mutans M230; identical to SEQ ID NO: 38

SEQ ID NO: 66 - protein, 457 aa, Streptococcus mutans M2A; identical to SEQ ID NO: 38

SEQ ID NO: 67 - protein, 457 aa, Streptococcus mutans N29
MSKIVIVGANHAGTAAINTILDNYGSENEVVVFDQNSNISFLGCGMALWIGKQISGPQGLFYADKESLEAKGAKIYMESPVTAIDYDAKRVTALVNGQEHVESYEKLILATGSTPILPPIKGAAIKEGSRDFEATLKNLQFVKLYQNAEDVINKLQDKSQNLNRIAVVGAGYIGVELAEAFKRLGKEVILIDVVDTCLAGYYDQDLSEMMRQNLEDHGIELAFGETVKAIEGNGKVERIVTDKASHDVDMVILAVGFRPNTALGNAKLKTFRNGAFLVDKKQETSIPDVYAIGDCATVYDNAINDTNYIALASNALRSGIVAGHNAAGHKLESLGVQGSNGISIFGLNMVSTGLTQEKAKRFGYNPEVTAFTDFQKASFIEHDNYPVTLKIVYDKDSRLVLGAQMASKEDMSMGIHMFSLAIQEKVTIEHLALLDYFFLPHFNQPYNYMTKAALKAK

SEQ ID NO: 68 - protein, 457 aa, Streptococcus mutans N3209; identical to SEQ ID NO: 43

SEQ ID NO: 69 - protein, 457 aa, Streptococcus mutans N34; identical to SEQ ID NO: 49

SEQ ID NO: 70 - protein, 457 aa, Streptococcus mutans N66; identical to SEQ ID NO: 43

SEQ ID NO: 71 - protein, 457 aa, Streptococcus mutans NCTC 11060; identical to SEQ ID NO: 49

SEQ ID NO: 72 - protein, 457 aa, Streptococcus mutans NFSM1
MSKIVIVGANHAGTAAINTILDNYGSENEVVVFDQNSNISFLGCGMALWIGKQISGPQGLFYADKESLEAKGAKIYMESPVTAIDYDAKRVTALVNGQEHVESYEKLILATGSTPILPPIKGAAIKEGSRDFEATLKNLQFVKLYQNAEDVINKLQDKSQNLNRIAVVGAGYIGVELAEAFKRLGKEVILIDVVDTCLAGYYDQDLSEMMRQNLEDHGIELAFGETVKAIEGDGKVERIVTDKASHDVDMVILAVGFRPNTALGNAKLKTFRNGAFLVDKKQETSIPDVYAIGDCATIYDNAINDTNYIALASNALRSGIVAGHNAAGHKLESLGVQGSNGISIFGLNMVSTGLTQEKAKRFGYNPEVTAFTDFQKASFIEHDNYPVTLKIVYDKDSRLVLGAQMASKEDMSMGIHMFSLAIQEKVTIERLALLDYFFLPHFNQPYNYMIKAALKAK

SEQ ID NO: 73 - protein, 457 aa, Streptococcus mutans NFSM2; identical to SEQ ID NO: 43

SEQ ID NO: 74 - protein, 457 aa, Streptococcus mutans NLML1; identical to SEQ ID NO: 49

SEQ ID NO: 75 - protein, 457 aa, Streptococcus mutans NLML4; identical to SEQ ID NO: 38

SEQ ID NO: 76 - protein, 457 aa, Streptococcus mutans NLML5
MSKIVIVGANHAGTAAINTILDNYGSENEVVVFDQNSNISFLGCGMALWIGKQISGPQGLFYADKESLEAKGAKIYMESPVTAIDYDAKRVTALVNGQEHVESYEKLILATGSTPILPPIKGAAIKEGSRDFEATLKNLQFVKLYQNAEDVINKLQDKTQNLNRIAVVGAGYIGVELAEAFKRLGKEVILIDVVDTCLAGYYDLDLSEMMRQNLEDHGIELAFGETVKAIEGDGKVERIVTDKASHDVDMVILAVGFRPNTALGNAKLKTFRNGAFLVDKKQETSIPDVYAIGDCATVYDNAINDTNYIALASNALRSGIVAGHNAAGHKLESLGVQGSNGISIFGLNMVSTGLTQEKAKRFGYNPEVTAFTDFQKASFIEHDNYPVTLKIVYDKDSRLVLGAQMASKEDMSMGIHMFSLAIQEKVTIERLALLDYFFLPHFNQPYNYMIKAALKAK

SEQ ID NO: 77 - protein, 457 aa, Streptococcus mutans NLML8
MSKIVIVGANHAGTAAINTILDNYGSENEVVVFDQNSNISFLGCGMALWIGKQISGSQGLFYADKESLEAKGAKIYMESPVTAIDYDAKRVTALVNGQEHVESYEKLILATGSTPILPPIKGAAIKEGSCDFEATLKNLQFVKLYQNAEDVINKLQDKSQNLNRIAVVGAGYIGVELAEAFKRLGKEVILIDVVDTCLAGYYDQDLSEMMRQNLEDHGIELAFGETVKAIEGDGKVERIVTDKASHDVDMVILAVGFRPNTALGNAKLKTFRNGAFLVDKKQETSIPDVYAIGDCATVYDNAINDTNYIALASNALRSGIVAGHNAAGHKLESLGVQGSNGISIFGLNMVSTGLTQEKAKRFGYNPEVTAFTDFQKASFIEHDNYPVTLKIVYDKDSRLVLGAQMASKEDMSMGIHMFSLAIQEKVTIERLALLDYFFLPHFNQPYNYMIKAALKAK

SEQ ID NO: 78 - protein, 457 aa, Streptococcus mutans NLML9; identical to SEQ ID NO: 49

SEQ ID NO: 79 - protein, 457 aa, Streptococcus mutans NMT4863
MSKIVIVGANHAGTAAINTILDNYGSENEVVVFDQNSNISFLGCGMALWIGKQISGPQGLFYADKESLEAKGAKIYMESPVTAIDYDAKRVTALVNGQEHVESYEKLILATGSTPILPPIKGAAIKEGSRDFEATLKNLQFVKLYQNAEDVINKLQDKTQNLNRIAVVGAGYIGVELAEAFKRLGKEVILIDVVDTCLAGYYDQDLSEMMRQNLEDHGIELAFGETVKAIEGDGKVERIVTDKASHDVDMVILAVGFRPNTALGNAKLKTFRNGAFLVDKKQETSIPDVYAIGDCATVYDNAINDTNYIALASNALRSGIVAGHNAAGHKLESLGVQGSNGISIFGLNMVSTGLTQEKAKRFGYNPEVTAFTDFQKASFIEHDNYPVTLKIVYDKDSRLVLGAQMASKEDMSMGIHMFSLAIQEKVTIERLALLDYFFLPHFNQPYNYMTKAALKAK

SEQ ID NO: 80 - protein, 457 aa, Streptococcus mutans NN2025; identical to SEQ ID NO: 38

SEQ ID NO: 81 - protein, 457 aa, Streptococcus mutans NV1996
MSKIVIVGANHAGTAAINTVLDNYGSENEVVVFDQNSNISFLGCGMALWIGKQISGPQGLFYADKESLEAKGAKIYMESPVTAIDYDAKRVTALINGQEHVESYEKLILATGSTPILPPIKGAAIKEGSRDFEATLKNLQFVKLYQNAEDVINKLQDKTQNLNRIAVVGAGYIGVELAEAFKRLGKEVILIDVVDTCLAGYYDQDLSEMMRQNLEDHGIELAFGETVKAIEGDGKVERIVTDKASHDVDMVILAVGFRPNTALGNAKLKTFRNGAFLVDKKQETSIPDVYAIGDCATVYDNAINDTNYIALASNALRSGIVAGHNAAGHKLESLGVQGSNGISIFGLNMVSTGLTQEKAKRFGYNPEVTAFTDFQKASFIEHDNYPVTLKIVYDKDSRLVLGAQMASKEDMSMGIHMFSLAIQEKVTIERLALLDYFFLPHFNQPYNYMIKAALKAK

SEQ ID NO: 82 - protein, 457 aa, Streptococcus mutans NVAB; identical to SEQ ID NO: 49

SEQ ID NO: 83 - protein, 457 aa, Streptococcus mutans OMZ175
MSKIVIVGANHAGTAAINTILDNYGSENEVVVFDQNSNISFLGCGMALWIGKQISGPQGLFYADKESLEAKGAKIYMESPVTAIDYDAKRVTALVNGQEHVESYEKLILATGSTPILPPIKGAAIKEGSCDFEATLKNLQFVKLYQNAEDVINKLQDKSQNLNRIAVVGAGYIGVELAEAFKRLGKEVILIDVVDTCLAGYYDQDLSEMMRQNLEDHGIELAFGETVKAIEGDGKVERIVTDKASHDVDMVILAVGFRPNTALGNAKLKTFRNGAFLVDKKQETSIPDVYAIGDCATVYDNAINDTNYIALASNALRSGIVAGHNAAGHKLESLGVQGSNGISIFGLNMVSTGLTQEKAKRFGYNPEVTAFTDFQKASFIEHDNYPVTLKIVYDKDSRLVLGAQMASKEDMSMGIHMFSLAIQEKVTIERLALLDYFFLPHFNQPYNYMTKAALKAK

SEQ ID NO: 84 - protein, 457 aa, Streptococcus mutans PKUSS-HG01; identical to SEQ ID NO: 39

SEQ ID NO: 85 - protein, 457 aa, Streptococcus mutans PKUSS-LG01; identical to SEQ ID NO: 39

SEQ ID NO: 86 - protein, 457 aa, Streptococcus mutans R221; identical to SEQ ID NO: 38

SEQ ID NO: 87 - protein, 455 aa, Streptococcus mutans S1B
MSKIVIVGANHAGTAAINTVLDNYGSENEVVVFDQNSNISFLGCGMALWIGKQISGPQGLFYADKESLEAKGAKIYMESPVTAIDYDAKRVTALVNGQEHVESYEKLILATGSTPILPPIKGAAIKEGSRDFEATLKNLQFVKLYQNAEDVINKLQDKSQNLNRIAVVGAGYIGVELAEAFKRLGKEVILIDVVDTCLAGYYDQDLSEMMRQNLEDHGIELAFGETVKAIEGDGKVERIVTDKASHDVDMVILAVGFRPNTALGNAKLKTFRNGAFLVDKKQETSIPDVYAIGDCATVYDNAINDTNYIALASNALRSGIVAGHNAAGHKLESLGVQGSNGISIFGLNMVSTGLTQEKAKRFGYNPEVTAFTDFQKASFIEHDNYPVTLKIVYDKDSRLVLGAQMASKEDMSMGIHMFSLAIQEKVTIERLALLDYFFLPHFNQPYNYMTKAALK

SEQ ID NO: 88 - protein, 457 aa, Streptococcus mutans SA38; identical to SEQ ID NO: 48

SEQ ID NO: 89 - protein, 457 aa, Streptococcus mutans SA41; identical to SEQ ID NO: 39

SEQ ID NO: 90 - protein, 457 aa, Streptococcus mutans SF1; identical to SEQ ID NO: 38

SEQ ID NO: 91 - protein, 457 aa, Streptococcus mutans SF12; identical to SEQ ID NO: 49

SEQ ID NO: 92 - protein, 457 aa, Streptococcus mutans SF14
MSKIVIVGANHAGTAAINTVLDNYGSENEVVVFDQNSNISFLGCGMALWIGKQISGPQGLFYADKESLEAKGAKIYMESPVTAIDYDAKRVTALVNGQEHVESYEKLILATGSTPILPPIKGAAIKEGSCDFEATLKNLQFVKLYQNAEDVINKLQDKSQNLNRIAVVGAGYIGVELAEAFKRLGKEVILIDVVDTCLAGYYDQDLSEMMRQNLEDHGIELAFGETVKAIEGDGKVERIVTDKASHDVDMVILAVGFRPNTALGNAKLKTFRNGAFLVDKKQETSIPDVYAIGDCATVYDNAINDTNYIALASNALRSGIVAGYNAAGHKLESLGVQGSNGISIFGLNMVSTGLTQEKAKRFGYNPEVTAFTDFQKASFIEHDNYPVTLKIVYDKDSRLVLGAQMASKEDMSMGIHMFSLAIQEKVTIERLALLDYFFLPHFNQPYNYMIKAALKAK

SEQ ID NO: 93 - protein, 457 aa, Streptococcus mutans SM1; identical to SEQ ID NO: 50

SEQ ID NO: 94 - protein, 457 aa, Streptococcus mutans SM4; identical to SEQ ID NO: 38

SEQ ID NO: 95 - protein, 457 aa, Streptococcus mutans SM6; identical to SEQ ID NO: 51

SEQ ID NO: 96 - protein, 457 aa, Streptococcus mutans ST1
MSKIVIVGANHAGTAAINTILDNYGSENEVVVFDQNSNISFLGCGMALWIGKQISGPQGLFYADKESLEAKGAKIYMESPVTAIDYDAKRVTALVNGQEHVESYEKLILATGSTPILPPIKGAAIKEGSCDFEATLKNLQFVKLYQNAEDVINKLQDKSQNLNRIAVVGAGYIGVELAEAFKRLGKEVILIDVVDTCLAGYYDQDLSEMMRQNLEDHGIELAFGETVKAIEGDGKVERIVTDKASHDVDMVILAVGFRPNTALGNAKLKTFRNGAFLVDKKQETSIPDVYAIGDCATVYDNAINDTNYIALASNALRSGIVAGHNAAGHKLESLGVQGSNGISIFGLNMVSTGLTQEKAKRFGYNPEVTAFTDFQKASFIEHDNYPVTLKIVYDKDSRLVLGAQMASKEDMSMGIHMFSLAIQEKVTIERLALLDYFFLPHFNQPYNYMIKAALKAK

SEQ ID NO: 97 - protein, 457 aa, Streptococcus mutans ST6; identical to SEQ ID NO: 79

SEQ ID NO: 98 - protein, 457 aa, Streptococcus mutans T4
MSKIVIVGANHAGTAAINTILDNYGSENEVVVFDQNSNISFLGCGMALWIGKQISGPQGLFYADKESLEAKGAKIYMESPVTAIDYDAKRVTALVNGQEHVESYEKLILATGSTPILPPIKGAAIKEGSRDFEATLKNLQFVKLYQNAEDVINKLQDKTQNLNRIAVVGAGYIGVELAEAFKRLGKEVILIDVVDTCLAGYYDQDLSEMMRQNLEDHGIELAFGETVKAIEGDGKVERIVTDKASHDVDMVILAVGFRPNTALGNVKLKTFRNGAFLVDKKQETSIPDVYAIGDCATVYDNAINDTNYIALASNALRSGIVAGHNAAGHKLESLGVQGSNGISIFGLNMVSTGLTQEKAKRFGYNPEVTAFTDFQKASFIEHDNYPVTLKIVYDKDSRLVLGAQMASKEDMSMGIHMFSLAIQEKVTIERLALLDYFFLPHFNQPYNYMIKAALKAK

SEQ ID NO: 99 - protein, 457 aa, Streptococcus mutans U138; identical to SEQ ID NO: 49

SEQ ID NO: 100 - protein, 457 aa, Streptococcus mutans U2A; identical to SEQ ID NO: 96

SEQ ID NO: 101 - protein, 457 aa, Streptococcus mutans U2B; identical to SEQ ID NO: 43

SEQ ID NO: 102 - protein, 457 aa, Streptococcus mutans UA159; identical to SEQ ID NO: 43

SEQ ID NO: 103 - protein, 457 aa, Streptococcus mutans UA159-FR; identical to SEQ ID NO: 43

SEQ ID NO: 104 - protein, 457 aa, Streptococcus mutans W6
MSKIVIVGANHAGTAAINTVLDNYGSENEVVVFDQNSNISFLGCGMALWIGKQISGPQGLFYADKELLEAKGAKIYMESPVTAIDYDAKRVTALVNGQEHVESYEKLILATGSTPILPPIKGAAIKEGSRDFEATLKNLQFVKLYQNAEDVINKLQDKTQNLNRIAVVGAGYIGVELAEAFKRLGKEVILIDVVDTCLAGYYDQDLSEMMRQNLEDHGIELAFGETVKAIEGDGKVERIVTDKASHDVDMVILAVGFRPNTALGNAKLKTFRNGAFLVDKKQETSIPDVYAIGDCATVYDNAINDTNYIALASNALRSGIVAGHNAAGHKLESLGVQGSNGISIFGLNMVSTGLTQEKAKRFGYNPEVTAFTDFQKASFIEHDNYPVTLKIVYDKDSRLVLGAQMASKEDMSMGIHMFSLAIQEKVTIERLALLDYFFLPHFNQPYNYMIKAALKAK

SEQ ID NO: 105 - protein, 459 aa, Streptococcus oralis
MSKIVVVGANHAGTACINTMLDNFGHENEIVVFDQNSNISFLGCGMALWIGEQIDGPEGLFYSDKEKLEAKGAKVYMNSPVLSIDYDNKVVTAEVEGKEHKESYDKLIFATGSTPILPPIEGVEIVKGNREFKATLENVQFVKLYQNAEEVIEKLEDKSKHLERIAVVGGGYIGVELAEAFERLGKEVVLVDIVDTVLNGYYDKDFTQMMAKNLEDHNIRLALGQTVKAIQGDGKVERLVTDKETFDVDMVVLAVGFRPNTALADGKIELFRNGAFLVDKKQETSIPGVYAVGDCATVYDNARKDTSYIALASNAVRTGIVGAYNACGHELEGIGVQGSNGISIYGLHMVSTGLTLEKAKAAGYNATETGFNDLQKPEFIKHDNHEVAIKIVFDKDSREILGAQMVSHDAAISMGIHMFSLAIQEHVTIDKLALTDLFFLPHFNKPYNYITMAALTAEK

SEQ ID NO: 106 - protein, 459 aa, Streptococcus oralis ATCC 35037
MSKIVVVGANHAGTACINTMLDNFGHENEIVVFDQNSNISFLGCGMALWIGEQIDGPEGLFYSDKEKLEAKGAKVYMNSPVLSIDYDNKVVTAEVEGKEHKESYDKLIFATGSTPILPPIEGVEIVKGNREFKATLENVQFVKLYQNAEEVIEKLEDKSKHLERIAVVGGGYIGVELAEAFERLGKEVVLVDIVDTVLNGYYDKDFTQMMAKNLEDHNIRLALGQTVKAIQGDGKVERLVTDKETFDVDMVVLAVGFRPNTALADGKIELFRNGAFLVDKKQETSIPGVYAVGDCATVYDNARKDTSYIALASNAVRTGIVGAYNACGHELEGIGVQGSNGISIYGLHMVSTGLTLEKAKAAGYNATETGFNDLQKPEFIKHDNHEVAIKIVFDKDSREILGAQMVSHDSAISMGIHMFSLAIQEHVTIDKLALTDLFFLPHFNKPYNYITMAALTAEK

SEQ ID NO: 107 - protein, 462 aa, Streptococcus pneumoniae 3063-00
MSKIVVVGANHAGTACINTMLDNFGNENEIVVFDQNSNISFLGCGMALWIGEQIDGAEGLFYSDKEKLEAKGAKVYMNSPVLSIDYDNKVVTAEVEGKEHKESYEKLIFATGSTPILPPIEGVEIVKGNREFKATLENVQFVKLYQNAEEVINKLSDKSQHLDRIAVVGGGYIGVELAEAFERLGKEVVLVDIVDTVLNGYYDKDFTQMMAKNLEDHNIRLALGQTVKAIEGDGKVERLITDKESFDVDMVILAVGFRPNTALADGKIELFRNGAFLVDKKQETSIPDVYAVGDCATVYDNARKDTSYIALASNAVRTGIVGAYNACGHELEGIGVQGSNGISIYGLHMVSTGLTLEKAKAAGYNATETGFNDLQKPEFMKHDNHEVAIKIVFDKDSREILGAQMVSHDIAISMGIHMFSLAIQEHVTIDKLALTDLFFLPHFNKPYNYITMAALTAENKNE

SEQ ID NO: 108 - protein, 459 aa, Streptococcus pneumoniae 4027-06
MSKIVVVGANHAGTACINTMLDNFGNENEIVVFDQNSNISFLGCGMALWIGEQIDGAEGLFYSDKEKLEAKGAKVYMNSPVLSIDYDNKVVTAEVEGKEHKESYEKLIFATGSTPILPPIEGVEIVKGNREFKATLENVQFVKLYQNAEEVINKLSDKSQHLDRIAVVGGGYIGVELAEAFERLGKEVVLVDIVDTVLNGYYDKDFTQMMAKNLEDHNIRLALGQTVKAIEGDGKVERLITDKESFDVDMVILAVGFRPNTALADGKIELFRNGAFLVDKKQETSIPGVYAVGDCATVYDNARKDTSYIALASNAVRTGIVGAYNACGHELEGIGVQGSNGISIYGLHMVSTGLTLEKAKAAGYNATETGFNDLQKPEFMKHDNHEVAIKIVFDKDSREILGAQMVSHDIAISMGIHMFSLAIQEHVTIDKLALTDLFFLPHFNKPYNYITMAALTAEK

SEQ ID NO: 109 - protein, 459 aa, Streptococcus pneumoniae 4075-00; identical to SEQ ID NO: 108

SEQ ID NO: 110 - protein, 459 aa, Streptococcus pneumoniae 5185-06; identical to SEQ ID NO: 108

SEQ ID NO: 111 - protein, 459 aa, Streptococcus pneumoniae 5652-06; identical to SEQ ID NO: 108

SEQ ID NO: 112 - protein, 459 aa, Streptococcus pneumoniae 5787-06; identical to SEQ ID NO: 108

SEQ ID NO: 113 - protein, 459 aa, Streptococcus pneumoniae 6735-05; identical to SEQ ID NO: 108

SEQ ID NO: 114 - protein, 459 aa, Streptococcus pneumoniae 6901-05; identical to SEQ ID NO: 108

SEQ ID NO: 115 - protein, 459 aa, Streptococcus pneumoniae 6963-05; identical to SEQ ID NO: 108

SEQ ID NO: 116 - protein, 459 aa, Streptococcus pneumoniae 7286-06; identical to SEQ ID NO: 108

SEQ ID NO: 117 - protein, 459 aa, Streptococcus pneumoniae 7533-05; identical to SEQ ID NO: 108

SEQ ID NO: 118 - protein, 388 aa, Streptococcus pneumoniae 7879-04
MSKIVVVGANHAGTACINTMLDNFGNENEIVVFDQNSNISFLGCGMALWIGEQIDGAEGLFYSDKEKLEAKGAKVYMNSPVLSIDYDNKVVTAEVEGKEHKESYEKLIFATGSTPILPPIEGVEIVKGNREFKATLENVQFVKLYQNAEEVINKLSDKSQHLDRIAVVGGGYIGVELAEAFERLGKEVVLVDIVDTVLNGYYDKDFTQMMAKNLEDHNIRLALGQTVKAIEGDGKVERLITDKESFDVDMVILAVGFRPNTALADGKIELFRNGAFLVDKKQETSIPGVYAVGDCATVYDNARKDTSYIALASNAVRTGIVGAYNACGHELEGIGVQGSNGISIYGLHMVSTGLTLEKAKAAGYNATETGFNDLQKPEFMKHDNHEVD

SEQ ID NO: 119 - protein, 459 aa, Streptococcus pneumoniae 8190-05; identical to SEQ ID NO: 108

SEQ ID NO: 120 - protein, 459 aa, Streptococcus pneumoniae ECC_3510
MSKIVVVGANHAGTACINTMLDNFGNENEIVVFDQNSNISFLGCGMALWIGEQIDGAEGLFYSDKDKLEAKGAKVYMNSPVLSIDYDNKVVTAEVEGKEHKESYEKLIFATGSTPILPPIEGVEIVKGNREFKATLENVQFVKLYQNAEEVINKLSDKSQHLDRIAVVGGGYIGVELAEAFERLGKEVVLVDIVDTVLNGYYDKDFTQMMAKNLEDHNIRLALGQTVKAIEGDGKVERLITDKESFDVDMVILAVGFRPNTALADGKIELFRNGAFLVDKKQETSIPGVYAVGDCATVYDNARKDTSYIALASNAVRTGIVGAYNACGHELEGIGVQGSNGISIYGLHMVSTGLTLEKAKAAGYNATETGFNDLQKPEFMKHDNHEVAIKIVFDKDSREILGAQMVSHDIAISMGIHMFSLAIQEHVTIDKLALTDLFFLPHFNKPYNYITMAALTAEK

SEQ ID NO: 121 - protein, 459 aa, Streptococcus pneumoniae England14-9; identical to SEQ ID NO: 108

SEQ ID NO: 122 - protein, 459 aa, Streptococcus pneumoniae EU-NP01
MSKIVVVGANHAGTACINTMLDNFGNENEIVVFDQNSNISFLGCGMALWIGEQIDGAEGLFYSDKEKLEAKGAKVYMNSPVLSIDYDNKVVTAEVEGKEHKESYEKLIFATGSTPILPPIEGVEIVKGNREFKATLENVQFVKLYQNAEEVINKLSDKSQHLDRIAVVGGGYIGVELAEAFERLGKEVVLVDIVDTVLNGYYDKDFTQMMAKNLEDHNIRLALGQTVKAIEGDGKVERLITDKESFDVDMVILAVGFRPNTALAGGKIELFRNGAFLVDKKQETSIPDVYAVGDCATVYDNARKDTSYIALASNAVRTGIVGAYNACGHELEGIGVQGSNGISIYGLHMVSTGLTLEKAKAAGYNATETGFNDLQKPEFMKHDNHEVAIKIVFDKDSREILGAQMVSHDIAISMGIHMFSLAIQEHVTIDKLALTDLFFLPHFNKPYNYITMAALTAEK

SEQ ID NO: 123 - protein, 459 aa, Streptococcus pneumoniae EU-NP02; identical to SEQ ID NO: 108

SEQ ID NO: 124 - protein, 459 aa, Streptococcus pneumoniae EU-NP03; identical to SEQ ID NO: 108

SEQ ID NO: 125 - protein, 459 aa, Streptococcus pneumoniae EU-NP04; identical to SEQ ID NO: 108

SEQ ID NO: 126 - protein, 459 aa, Streptococcus pneumoniae EU-NP05; identical to SEQ ID NO: 108

SEQ ID NO: 127 - protein, 459 aa, Streptococcus pneumoniae GA02254; identical to SEQ ID NO: 108

SEQ ID NO: 128 - protein, 459 aa, Streptococcus pneumoniae GA02270; identical to SEQ ID NO: 108

SEQ ID NO: 129 - protein, 459 aa, Streptococcus pneumoniae GA02506; identical to SEQ ID NO: 120

SEQ ID NO: 130 - protein, 459 aa, Streptococcus pneumoniae GA02714; identical to SEQ ID NO: 108

SEQ ID NO: 131 - protein, 459 aa, Streptococcus pneumoniae GA04175; identical to SEQ ID NO: 108

SEQ ID NO: 132 - protein, 459 aa, Streptococcus pneumoniae GA05248; identical to SEQ ID NO: 120

SEQ ID NO: 133 - protein, 459 aa, Streptococcus pneumoniae GA05578; identical to SEQ ID NO: 120

SEQ ID NO: 134 - protein, 459 aa, Streptococcus pneumoniae GA06083; identical to SEQ ID NO: 108

SEQ ID NO: 135 - protein, 459 aa, Streptococcus pneumoniae GA07228; identical to SEQ ID NO: 108

SEQ ID NO: 136 - protein, 459 aa, Streptococcus pneumoniae GA07643; identical to SEQ ID NO: 122

SEQ ID NO: 137 - protein, 459 aa, Streptococcus pneumoniae GA07914; identical to SEQ ID NO: 122

SEQ ID NO: 138 - protein, 459 aa, Streptococcus pneumoniae GA08780; identical to SEQ ID NO: 108

SEQ ID NO: 139 - protein, 459 aa, Streptococcus pneumoniae GA08825
MSKIVVVGANHAGTACINTMLDNFGNENEIVVFDQNSNISFLGCGMALWIGEQIDGAEGLFYSDKEKLEAKGAKVYMNSPVLSIDYDNKVVTAEVEGKEHKESYEKLIFATGSTPILPPIEGVEIVKGNREFKATLENVQFVKLYQNAEEVINKLSDKSQHLDRIAVVGGGYIGVELAEAFERLGKEVVLVDIVDTVLNGYYDKDFTQMMAKNLEDHNIRLALGQTVKAIEGDGKVERLITDKESFDVDMVILAVGFRPNTALADGKIELFRNGAFLVDKKQETSIPDVYAVGDCATVYDNARKDTSYIALASNAVRTGIVGAYNACGHELEGIGVQGSNGISIYGLHMVSTGLTLEKAKAAGYNATETGFNDLQKPEFMKHDNHEVAIKIVFDKDSREILGAQMVSHDIAISMGIHMFSLAIQEHVTIDKLALTDLFFLPHFNKPYNYITMAALTAEK

SEQ ID NO: 140 - protein, 459 aa, Streptococcus pneumoniae GA11304; identical to SEQ ID NO: 120

SEQ ID NO: 141 - protein, 459 aa, Streptococcus pneumoniae GA11426; identical to SEQ ID NO: 108

SEQ ID NO: 142 - protein, 459 aa, Streptococcus pneumoniae GA11856; identical to SEQ ID NO: 108

SEQ ID NO: 143 - protein, 459 aa, Streptococcus pneumoniae GA13224; identical to SEQ ID NO: 108

SEQ ID NO: 144 - protein, 459 aa, Streptococcus pneumoniae GA13338; identical to SEQ ID NO: 108

SEQ ID NO: 145 - protein, 459 aa, Streptococcus pneumoniae GA13430; identical to SEQ ID NO: 108

SEQ ID NO: 146 - protein, 459 aa, Streptococcus pneumoniae GA13499; identical to SEQ ID NO: 139

SEQ ID NO: 147 - protein, 459 aa, Streptococcus pneumoniae GA14688
MSKIVVVGANHAGTACINTMLDNFGNENEIVVFDQNSNISFLGCGMALWIGEQIDGAEGLFYSDKEKLEAKGAKVYMNSPVLSIDYDNKVVIAEVEGKEHKESYEKLIFATGSTPILPPIEGVEIVKGNREFKATLENVQFVKLYQNAEEVINKLSDKSQHLDRIAVVGGGYIGVELAEAFERLGKEVVLVDIVDTVLNGYYDKDFTQMMAKNLEDHNIRLALGQTVKAIEGDGKVERLITDKESFDVDMVILAVGFRPNTALADGKIELFRNGAFLVDKKQETSIPGVYAVGDCATVYDNARKDTSYIALASNAVRTGIVGAYNACGHELEGIGVQGSNGISIYGLHMVSTGLTLEKAKAAGYNATETGFNDLQKPEFMKHDNHEVAIKIVFDKDSREILGAQMVSHDIAISMGIHMFSLAIQEHVTIDKLALTDLFFLPHFNKPYNYITMAALTAEK

SEQ ID NO: 148 - protein, 459 aa, Streptococcus pneumoniae GA16531; identical to SEQ ID NO: 120

SEQ ID NO: 149 - protein, 459 aa, Streptococcus pneumoniae GA17301; identical to SEQ ID NO: 108

SEQ ID NO: 150 - protein, 459 aa, Streptococcus pneumoniae GA18068; identical to SEQ ID NO: 122

SEQ ID NO: 151 - protein, 459 aa, Streptococcus pneumoniae GA18523; identical to SEQ ID NO: 108

SEQ ID NO: 152 - protein, 459 aa, Streptococcus pneumoniae GA19101; identical to SEQ ID NO: 108

SEQ ID NO: 153 - protein, 459 aa, Streptococcus pneumoniae GA19690; identical to SEQ ID NO: 108

SEQ ID NO: 154 - protein, 459 aa, Streptococcus pneumoniae GA19923; identical to SEQ ID NO: 108

SEQ ID NO: 155 - protein, 459 aa, Streptococcus pneumoniae GA40183; identical to SEQ ID NO: 108

SEQ ID NO: 156 - protein, 459 aa, Streptococcus pneumoniae GA40410; identical to SEQ ID NO: 108

SEQ ID NO: 157 - protein, 459 aa, Streptococcus pneumoniae GA40563; identical to SEQ ID NO: 108

SEQ ID NO: 158 - protein, 459 aa, Streptococcus pneumoniae GA41410; identical to SEQ ID NO: 108

SEQ ID NO: 159 - protein, 459 aa, Streptococcus pneumoniae GA41538; identical to SEQ ID NO: 120

SEQ ID NO: 160 - protein, 459 aa, Streptococcus pneumoniae GA43257; identical to SEQ ID NO: 108

SEQ ID NO: 161 - protein, 459 aa, Streptococcus pneumoniae GA43264; identical to SEQ ID NO: 108

SEQ ID NO: 162 - protein, 459 aa, Streptococcus pneumoniae GA43265; identical to SEQ ID NO: 108

SEQ ID NO: 163 - protein, 459 aa, Streptococcus pneumoniae GA44128; identical to SEQ ID NO: 147

SEQ ID NO: 164 - protein, 459 aa, Streptococcus pneumoniae GA44194
MSKIVVVGANHAGTACINTMLDNFGNENEIVVFDQNSNISFLGCGMALWIGEQIDGAEGLFYSDKEKLEAKGAKVYMNSPVLSIDYDNKVVTAEVEGKEHKESYEKLIFATGSTPILPPIEGVEIVKGNREFKATLENVQFVKLYQNAEEVINKLSDKSQHLDRIAVVGGGYIGVELAEAFERLGKEVVLVDIVDTVLNGYYDKDFTQMMAKNLEDHNIRLALGQTVKAIEGDGKVERLITDKESFDVDMVILAVGFRPNTALADGKIELFRNGAFLVDKKQETSIPGVYAVGDCATVYDNARKDTSYIALASNAVRTGIVGAYNACGHELEGIGVQGSNGISIYGLHMVSTGLTLEKAKAAGYNATETGFNDLQKPEFMKYDNHEVAIKIVFDKDSREILGAQMVSHDIAISMGIHMFSLAIQEHVTIDKLALTDLFFLPHFNKPYNYITMAALTAEK

SEQ ID NO: 165 - protein, 459 aa, Streptococcus pneumoniae GA44288; identical to SEQ ID NO: 108

SEQ ID NO: 166 - protein, 459 aa, Streptococcus pneumoniae GA44378; identical to SEQ ID NO: 108

SEQ ID NO: 167 - protein, 459 aa, Streptococcus pneumoniae GA44386; identical to SEQ ID NO: 108

SEQ ID NO: 168 - protein, 459 aa, Streptococcus pneumoniae GA44452; identical to SEQ ID NO: 108

SEQ ID NO: 169 - protein, 459 aa, Streptococcus pneumoniae GA44500; identical to SEQ ID NO: 108

SEQ ID NO: 170 - protein, 459 aa, Streptococcus pneumoniae GA44511; identical to SEQ ID NO: 108

SEQ ID NO: 171 - protein, 459 aa, Streptococcus pneumoniae GA47033; identical to SEQ ID NO: 108

SEQ ID NO: 172 - protein, 459 aa, Streptococcus pneumoniae GA47179; identical to SEQ ID NO: 164

SEQ ID NO: 173 - protein, 459 aa, Streptococcus pneumoniae GA47210; identical to SEQ ID NO: 108

SEQ ID NO: 174 - protein, 459 aa, Streptococcus pneumoniae GA47281; identical to SEQ ID NO: 108

SEQ ID NO: 175 - protein, 459 aa, Streptococcus pneumoniae GA47360; identical to SEQ ID NO: 122

SEQ ID NO: 176 - protein, 459 aa, Streptococcus pneumoniae GA47373; identical to SEQ ID NO: 122

SEQ ID NO: 177 - protein, 459 aa, Streptococcus pneumoniae GA47388; identical to SEQ ID NO: 108

SEQ ID NO: 178 - protein, 459 aa, Streptococcus pneumoniae GA47439
MSKIVVVGANHAGTACINTMLDNFGNENEIVVFDQNSNISFLGCGMALWIGEQIDGAEGLFYSDKEKLEAKGAKVYMNSPVLSIDYDNKVVTAEVEGKEHKESYEKLIFATGSTPILPPIEGVEIVKGNREFKATLENVQFVKLYQNAEEVINKLSDKSQHLDRIAVVGGGYIGVELAEAFERLGKEVVLVDIVDTVLNGYYDKDFTQMMAKNLEDHNIRLALGQTVKAIEGDGKVERLITDKESFDVDMVILAVGFRPNTALADGKIELFRNGAFLVDKKQETSIPGVYAVGDCATVYDNARKDTNYIALASNAVRTGIVGAYNACGHELEGIGVQGSNGISIYGLHMVSTGLTLEKAKAAGYNATETGFNDLQKPEFMKHDNHEVAIKIVFDKDSREILGAQMVSHDIAISMGIHMFSLAIQEHVTIDKLALTDLFFLPHFNKPYNYITMAALTAEK

SEQ ID NO: 179 - protein, 459 aa, Streptococcus pneumoniae GA47461
MSKIVVVGANHAGTACINTMLDNFGNENEIVVFDQNSNISFLGCGMALWIGEQIDGAEGLFYSDKEKLEAKGAKVYMNSPVLSIDYDNKVVTAEVEGKEHKESYEKLIFATGSTPILPPIEGVEIVKGNREFKATLENVQFVKLYQNAEEVINKLSDKSQHLDRIAVVGGGYIGVELAEAFERLGKEVVLVDIVDTVLNGYYDKDFTQMMAKNLEDHNIRLALGQTVKAIEGDGKVERLITDKESFDVDMVILAVGFRPNTALAGGKIELFRNGAFLVDKKQETSIPDVYAVGDCATVYDNARKDTSYIALASNAVRTGIVGAYNACGHELEGIGVQGSNGISIYGLHMVSTGLTLEKAKAAGYNATETGFNDFQKPEFMKHDNHEVAIKIVFDKDSREILGAQMVSHDIAISMGIHMFSLAIQEHVTIDKLALTDLFFLPHFNKPYNYITMAALTAEK

SEQ ID NO: 180 - protein, 459 aa, Streptococcus pneumoniae GA47502; identical to SEQ ID NO: 179

SEQ ID NO: 181 - protein, 459 aa, Streptococcus pneumoniae GA47522; identical to SEQ ID NO: 108

SEQ ID NO: 182 - protein, 459 aa, Streptococcus pneumoniae GA47597; identical to SEQ ID NO: 108

SEQ ID NO: 183 - protein, 459 aa, Streptococcus pneumoniae GA47628; identical to SEQ ID NO: 139

SEQ ID NO: 184 - protein, 459 aa, Streptococcus pneumoniae GA47751; identical to SEQ ID NO: 108

SEQ ID NO: 185 - protein, 459 aa, Streptococcus pneumoniae GA47760; identical to SEQ ID NO: 122

SEQ ID NO: 186 - protein, 459 aa, Streptococcus pneumoniae GA47976; identical to SEQ ID NO: 108

SEQ ID NO: 187 - protein, 459 aa, Streptococcus pneumoniae GA49138; identical to SEQ ID NO: 108

SEQ ID NO: 188 - protein, 459 aa, Streptococcus pneumoniae GA49194; identical to SEQ ID NO: 108

SEQ ID NO: 189 - protein, 459 aa, Streptococcus pneumoniae GA49447; identical to SEQ ID NO: 108

SEQ ID NO: 190 - protein, 459 aa, Streptococcus pneumoniae GA49542; identical to SEQ ID NO: 108

SEQ ID NO: 191 - protein, 459 aa, Streptococcus pneumoniae GA52612; identical to SEQ ID NO: 108

SEQ ID NO: 192 - protein, 459 aa, Streptococcus pneumoniae GA54644; identical to SEQ ID NO: 108

SEQ ID NO: 193 - protein, 459 aa, Streptococcus pneumoniae NorthCarolina6A-23; identical to SEQ ID NO: 108

SEQ ID NO: 194 - protein, 459 aa, Streptococcus pneumoniae NP070; identical to SEQ ID NO: 108

SEQ ID NO: 195 - protein, 459 aa, Streptococcus pneumoniae NP112; identical to SEQ ID NO: 147

SEQ ID NO: 196 - protein, 459 aa, Streptococcus pneumoniae NP127; identical to SEQ ID NO: 120

SEQ ID NO: 197 - protein, 459 aa, Streptococcus pneumoniae NP141; identical to SEQ ID NO: 108

SEQ ID NO: 198 - protein, 459 aa, Streptococcus pneumoniae NP170
MSKIVVVGANHAGTACINTMLDNFGNENEIVVFDQNSNISFLGCGMALWIGEQIDGAEGLFYSDKDKLEAKGAKVYMNSPVLSIDYDNKVVTAEVEGKEHKESYEKLIFATGSTPILPPIEGVEIVKGNREFKATLENVQFVKLYQNAEEVINKLSDKSQHLNRIAVVGGGYIGVELAEAFERLGKEVVLVDIVDTVLNGYYDKDFTQMMAKNLEDHNIRLALGQTVKAIEGDGKVERLITDKESFDVDMVILAVGFRPNTALADGKIELFRNGAFLVDKKQETSIPGVYAVGDCATVYDNARKDTSYIALASNAVRTGIVGAYNACGHELEGIGVQGSNGISIYGLHMVSTGLTLEKAKAAGYNATETGFNDLQKPEFMKHDNHEVAIKIVFDKDSREILGAQMVSHDIAISMGIHMFSLAIQEHVTIDKLALTDLFFLPHFNKPYNYITMAALTAEK

SEQ ID NO: 199 - protein, 459 aa, Streptococcus pneumoniae SPAR27; identical to SEQ ID NO: 108

SEQ ID NO: 200 - protein, 459 aa, Streptococcus pneumoniae SPAR48; identical to SEQ ID NO: 108

SEQ ID NO: 201 - protein, 459 aa, Streptococcus pneumoniae SPAR55; identical to SEQ ID NO: 122

SEQ ID NO: 202 - protein, 459 aa, Streptococcus pneumoniae SPAR95; identical to SEQ ID NO: 108

SEQ ID NO: 203 - protein, 459 aa, Streptococcus pyogenes; identical to SEQ ID NO: 108

SEQ ID NO: 204 - protein, 456 aa, Streptococcus pyogenes A20
MSKIVVVGANHAGTACIKTMLTNYGDANEIVVFDQNSNISFLGCGMALWIGEQIAGPEGLFYSDKEELESLGAKVYMESPVQSIDYDAKTVTALVDGKNHVETYDKLIFATGSQPILPPIKGAEIKEGSLEFEATLENLQFVKLYQNSADVIAKLENKDIKRVAVVGAGYIGVELAEAFQRKGKEVVLIDVVDTCLAGYYDRDLTDLMAKNMEEHGIQLAFGETVKEVAGNGKVEKIITDKNEYDVDMVILAVGFRPNTTLGNGKIDLFRNGAFLVNKRQETSIPGVYAIGDCATIYDNATRDTNYIALASNAVRTGIVAAHNACGTDLEGIGVQGSNGISIYGLHMVSTGLTLEKAKRLGFDAAVTEYTDNQKPEFIEHGNFPVTIKIVYDKDSRRILGAQMAAREDVSMGIHMFSLAIQEGVTIEKLALTDIFFLPHFNKPYNYITMAALGAKD

SEQ ID NO: 205 - protein, 456 aa, Streptococcus pyogenes AA216; identical to SEQ ID NO: 204

SEQ ID NO: 206 - protein, 456 aa, Streptococcus pyogenes AA472
MSKIVVVGANHAGTACIKTMLTNYGDANEIVVFDQNSNISFLGCGMALWIGEQIAGPEGLFYSDKEELESLGAKVYMESPVQSIDYDAKTVTALVDGKNHVETYDKLIFATGSQPILPPIKGAEIKEGSLEFEATLENLQFVKLYQNSADVIAKLENKDIKRVAVVGAGYIGVELAEAFQRKGKEVVLIDVVDTCLAGYYDRDLTDLMAKNMEEHGIQLAFGETVKEVAGNGKVEKIITDKNEYDVDMVILAVGFRPNTTLGNGKIELFRNGAFLVNKRQETSIPGVYAIGDCATIYDNATRDTNYIALASNAVRTGIVAAHNACGTDLEGIGVQGSNGISIYGLHMVSTGLTLEKAKRLGFDAAVTEYTDNQKPEFIEHGNFPVTIKIVYDKDSRRILGAQMAAREDVSMGIHMFSLAIQEGVTIEKLALTDIFFLPHFNKPYNYITMAALGAKD

SEQ ID NO: 207 - protein, 456 aa, Streptococcus pyogenes Alab49
MSKIVVVGANHAGTACIKTMLTNYGDANEIVVFDQNSNISFLGCGMALWIGEQIAGPEGLFYSDKEELESLGAKVYMESPVQSIDYDAKTVTALVDGKNHVETYDKLIFATGSQPILPPIKGAEIKEGSLEFEATLENLQFVKLYQNSADVIAKLENKDIKRVAVVGAGYIGVELAEAFQRKGKEVVLIDVVDTCLAGYYDRDLTDLMAKNMEEHGIQLAFGETVKEVAGNGKVEKIITDKNEYDVDMVILAVGFRPNTTLGNGKIDLFRNGAFLVNKRQETSIPGVYAIGDCATIYDNATRDTNYIALASNAVRTGIVAAHNACGTDLEGIGVQGSNGISIYGLHMVSTGLTLEKAKRLGFDAAVTEYTDNQKPEFIEHGNFPVTIKIVYDKDSRRILGAQMAAREDMSMGIHMFSLAIQEGVTIEKLALTDIFFLPHFNKPYNYITMAALGAKD

SEQ ID NO: 208 - protein, 456 aa, Streptococcus pyogenes HKU QMH11M0907901
MSKIVVVGANHAGTACIKTMLTNYGDANEIVVFDQNSNISFLGCGMALWIGEQIAGPEGLFYSDKEELESLGAKVYMESPVQSIDYDAKTVTALVDGKNHVETYDKLIFATGSQPILPPIKGAEIKEGSLEFEATLENLQFVKLYQNSADVIAKLENKDIKRVAVVGAGYIGVELAEAFQRKGKEVVLIDVVDTCLAGYYDRDLTDLMAKNMEEHGIQLAFGETVKEVAGNGKVEKIITDKNEYDVDMVILAVGFRPNTTLGNGKIELFRNGAFLVNKRQETSIPGVYAIGDCATIYDNATRDTNYIALASNAVRTGIVAAHNACGTDLEGIGVQGSNGISIYGLHMVSTGLTLEKAKRLGFDAAVTEYTDNQKPEFIEHGNFPVTIKIVYDKDSRRILGAQMAAREDMSMGIHMFSLAIQEGVTIEKLALTDIFFLPHFNKPYNYITMAALGAKD

SEQ ID NO: 209 - protein, 456 aa, Streptococcus pyogenes JRS4; identical to SEQ ID NO: 204

SEQ ID NO: 210 - protein, 456 aa, Streptococcus pyogenes M1 476; identical to SEQ ID NO: 207

SEQ ID NO: 211 - protein, 456 aa, Streptococcus pyogenes M1 GAS; identical to SEQ ID NO: 204

SEQ ID NO: 212 - protein, 456 aa, Streptococcus pyogenes MGAS10270; identical to SEQ ID NO: 204

SEQ ID NO: 213 - protein, 456 aa, Streptococcus pyogenes MGAS10394
MSKIVVVGANHAGTACIKTMLTNYGDANEIVVFDQNSNISFLGCGMALWIGEQIAGPEGLFYSDKEELESLGAKVYMESPVQSIDYDAKTVTALVDGKNHVETYDKLIFATGSQPILPPIKGAEIKEGSLEFEATLQNLQFVKLYQNSADVIAKLENKDIKRVAVVGAGYIGVELAEAFQRKGKEVVLIDVVDTCLAGYYDRDLTDLMAKNMEEHGIQLAFGETVKEVAGNGKVEKIITDKNEYDVDMVILAVGFRPNTTLGNGKIDLFRNGAFLVNKRQETSIPGVYAIGDCATIYDNATRDTNYIALASNAVRTGIVAAHNACGTDLEGIGVQGSNGISIYGLHMVSTGLTLEKAKRLGFDAAVTEYTDNQKPEFIEHGNFLVTIKIVYDKDSRRILGAQMAAREDVSMGIHMFSLAIQEGVTIEKLALTDIFFLPHFNKPYNYITMAALGAKD

SEQ ID NO: 214 - protein, 456 aa, Streptococcus pyogenes MGAS10750; identical to SEQ ID NO: 213

SEQ ID NO: 215 - protein, 456 aa, Streptococcus pyogenes MGAS2096; identical to SEQ ID NO: 206

SEQ ID NO: 216 - protein, 456 aa, Streptococcus pyogenes MGAS2111
MSKIVVVGANHAGTACIKTMLTNYGDANEIVVFDQNSNISFLGCGMALWIGEQIAGPEGLFYSDKEELESLGAKVYMESPVQSIDYDAKTVTALVDGKNHVETYDKLIFATGSQPILPPIKGAEIKEGSLEFEATLENLQFVKLYQNSADVIAKLENKDIKRVAVVGAGYIGVELAEAFQRKGKEVVLIDVVDTCLAGYYDRDLTDLMAKNMEEHGIQLAFGETVKEVAGNGKVEKIITDKNEYDVDMVILAVGFRPNTTLGNGKIDLFRNGAFLVNKRQETSIPGVYAIGDCATIYDNATRDTNYIALASNAVRTGIVAAHNACGTDLEGIGVQGSNGISIYGLHMVSTGLTLEKAKRLGFDAAVTEYTDNQKPEFIEHGNFPVTIKIVYDKDSRRILGTQMAAREDMSMGIHMFSLAIQEGVTIEKLALTDIFFLPHFNKPYNYITMAALGAKD

SEQ ID NO: 217 - protein, 356 aa, Streptococcus pyogenes MGAS5005
METYDKLIFATGSQPILPPIKGAEIKEGSLEFEATLENLQFVKLYQNSADVIAKLENKDIKRVAVVGAGYIGVELAEAFQRKGKEVVLIDVVDTCLAGYYDRDLTDLMAKNMEEHGIQLAFGETVKEVAGNGKVEKIITDKNEYDVDMVILAVGFRPNTTLGNGKIDLFRNGAFLVNKRQETSIPGVYAIGDCATIYDNATRDTNYIALASNAVRTGIVAAHNACGTDLEGIGVQGSNGISIYGLHMVSTGLTLEKAKRLGFDAAVTEYTDNQKPEFIEHGNFPVTIKIVYDKDSRRILGAQMAAREDVSMGIHMFSLAIQEGVTIEKLALTDIFFLPHFNKPYNYITMAALGAKD

SEQ ID NO: 218 - protein, 456 aa, Streptococcus pyogenes MGAS6180
MSKIVVVGANHAGTACIKTMLTNYGDANEIVVFDQNSNISFLGCGMALWIGEQIAGPEGLFYSDKEELESLGAKVYMESPVQSIDYDTKTVTALVDGKNHVETYDKLIFATGSQPILPPIKGAEIKEGSLEFEATLENLQFVKLYQNSADVIAKLENKDIKRVAVVGAGYIGVELAEAFQRKGKEVVLIDVVDTCLAGYYDRDLTDLMAKNMEEHGIQLAFGETVKEVAGNGKVEKIITDKNEYDVDMVILAVGFRPNTTLGNGKIDLFRNGAFLVNKRQETSIPGVYAIGDCATIYDNATRDTNYIALASNAVRTGIVAAHNACGTDLEGIGVQGSNGISIYGLHMVSTGLTLEKAKRLGFDAAVTEYTDNQKPEFIEHGNFPVTIKIVYDKDSRRILGAQMAAREDMSMGIHMFSLAIQEGVTIEKLALTDIFFLPHFNKPYNYITMAALGAKD

SEQ ID NO: 219 - protein, 456 aa, Streptococcus pyogenes MGAS9429; identical to SEQ ID NO: 204

SEQ ID NO: 220 - protein, 456 aa, Streptococcus pyogenes SS1447; identical to SEQ ID NO: 208

SEQ ID NO: 221 - protein, 457 aa, Streptococcus ratti FA-1 = DSM 20564
MSKIVVVGANHAGTSSVNTILDNYGSENEVVVFDQNSNISFLGCGMALWIGKQISGPQGLFYADKELLESKGAKVYMESPVTAIDYDAKTVTALVNGQEHVENYDKLILATGSTPILPPIEGASIKEGSREFEATLENLQFVKLYQNAEDVINKLQDKSKNLNRVAVVGAGYIGVELAEAFKRLGKEVTLIDVVDTCLAGYYDRDLSDMMSQNLEDHGIQLAFGETVKAIEGDGKVERIVTDKASRDVDMVILAVGFRPNTALGAGKLETFRNGAFLVNKKQETSLPDVYAVGDCATVYDNAINDTNYIALASNALRSGIVAGHNAAGHELESLGVQGSNGISIFGLNMVSTGLTAEKAKRFGYNPEVTELTDSQKASFIEHDNYPVTLKIVYDKDSRLILGAQMASKEDMSMGIHMFSLAIQEKVTIDRLALLDFFFLPHFNQPYNYITKAALNAK

SEQ ID NO: 222 - protein, 461 aa, Streptococcus salivarius K12
MDKLMSKIVVVGANHAGTFSINTILDNYGDQNEVVVFDQNSNISFLGCGMALWIGNQISGSDGLFYANKEGLESKGAKVYMNSPVESIDFDGKTVTALVDGKEHVESYDKLILATGSQPILPPIEGAEIKEGSRTFEATLENLQFVKLFQNAQEVIDKLNDKSQDIKRVAVVGAGYIGVELAEAFQRHGKEVILIDVVDTCLAGYYDHDLTELMAKNMESHGIKLAFGETVKAVEGDTKVERIVTDKNAYDVDMVVLAVGFRPNTALGAGKLETFRNGAYLVNKKQETSIKDVYAVGDCATVYDNALEDVNYIALASNAVRSGIVGGHNAGGGDVESNGVQGSNGISIYGLNMVSTGLTEEKAKRFGFNPAVVESTDLQKAAFMEDENEDVTIKIVYDKDTRKVLGAQMVSRMDISMGIHMFSLAIQEGVTIDRLQLLDLFFLPHFNQPLSYIAKAAISAK

SEQ ID NO: 223 - protein, 459 aa, Streptococcus sinensis
MSKIVVVGANHAGTACINTMLDNFGHENEIVVFDQNSNISFLGCGMALWIGEQIDGPEGLFYSNKEKLEEKGARIYMNSPVLSIDYDNKVVTAEVEGQEHKESYDKLIFATGSTPILPPIEGVEIVEGNREFKTTLDNVQFVKLYQNAEEVINKLADKSNHLERIAVVGGGYIGVELAEAFERLGKEVVLVDIVDTVLNGYYDKDFTQLMAKNLEDHNIRLALGQTVKAIQGDGKVERLVTDKETFDVDMVVLAVGFRPNTALADGKIELFRNGAFLVDKKQETSIPGVYAVGDCATVYDNARKDTSYIALASNAVRTGIVGAYNACGHELEGIGVQGSNGISIYGLHMVSTGLTLEKAKAAGYNATETGFNDLQKPEFMKHDNHEVAIKIVFDKDSREILGAQMVSHDPAIGMGIHMFSLAIQEHVTIDKLALTDIFFLPHFNKPYNYITMAALTAEK

SEQ ID NO: 224 - protein, 48 aa, Streptococcus sp. HSISB1
MALWIGDQISGPEGLFYSSKEELEALGATIYMNSPVIAVDYDKKLLQP

SEQ ID NO: 225 - protein, 457 aa, Streptococcus sp. HSISS1
MSKIVVVGANHAGTFSINTILDNYGDQNEVVVFDQNSNISFLGCGMALWIGNQISGSDGLFYANKEGLESKGAKVYMNSPVESIDFDGKTVTALVDGKEHVESYDKLILATGSQPILPPIEGAEIKEGSRTFEATLDNLQFVKLFQNAQEVIDKLNDKSQDIKRVAVVGAGYIGVELAEAFQRHGKEVILIDVVDTCLAGYYDHDLTDLMAKNMESHGIKLAFGETVKAVEGETKVERIVTDKNAYDVDMVVLAVGFRPNTALGAGKLETFRNGAYLVNKKQETSIKDVYAVGDCATVYDNALDDVNYIALASNAVRSGIVGGHNAGGGDVESNGVQGSNGISIYGLNMVSTGLTEEKAKRFGFNPAVVSSTDLQKAAFMEDENADVTIKIVYDKDTRKVLGAQMVSRMDISMGIHMFSLAIQEGVTIDRLQLLDLFFLPHFNQPLSYIAKAAISAK

SEQ ID NO: 226 - protein, 457 aa, Streptococcus sp. HSISS4; identical to SEQ ID NO: 225

SEQ ID NO: 227 - protein, 457 aa, Streptococcus thermophilus
MSKIVVVGANHAGTYSINTILDNYGDQNEVVVFDQNSNISFLGCGMALWIGNQISGPNGLFYANKEGLESKGAKVYINSPVESIDFDGKTVTALVDGKEHVESYDKLILATGSQPILPPIDGAEIKEGSRTFEATLENLQFVKLFQNAQEVIDKLNDKSQDIKRVAVVGAGYIGVELAEAFQRRGKEVILIDVVDTCLAGYYDRDFTDRMAKNLEDHGIQLAFGETVKAVEGETKVERIVTDKNAYDVDMVVLAVGFRPNTALGAGKLETFRNGAYLVNKKQETSVKNVYAVGDCATVYDNALDDVNYIALASNAIRSGIVAGHNAGGGDVESNGVQGSNGISIYGLNMVSTGLTEEKAKRFGFNPAVVESTDLQKPPFMKDENEDVTIKIVYDKDTRKVLGAQMVSLMDISMGIHMFSLAIQEGVTIDRLQLLDLFFMPHFNQPLSYIAKAAISAE

SEQ ID NO: 228 - protein, 457 aa, Streptococcus thermophilus CAG:236
MSKIVVVGANHAGTYSINTILDNYGDQNEVVVFDQNSNISFLGCGMALWIGNQISGPDGLFYANKEGLESKGAKVYINSPVESIDFDGKTVTALVDGKEHVESYDKLILATGSQPILPPIDGAEIKEGSRTFEATLENLQFVKLFQNAQEVIDKLNDKSQDIKRVAVVGAGYIGVELAEAFQRHGKEVILIDVVDTCLAGYYDRDFTYRMAKNLEDHGIQLAFGETVKAVEGETKVERIVTDKNAYDVDMVVLAVGFRPNTALGAGKLETFRNGAYLVNKKQETSVKDVYAVGDCATVYDNALDDVNYIALASNAIRSGIVAGHNAGGGDVESNGVQGSNGISIYGLNMVSTGLTEEKAKRFGFNPAVVESTDLQKLPFMKDENEDVTIKIVYDKDTRKVLGAQMVSLMDISMGIHMFSLAIQEGVTIDRLQLLDLFFLPHFNQPLSYIAKAAISAE

SEQ ID NO: 229 - protein, 461 aa, Streptococcus thermophilus CNRZ1066
MDKFMSKIVVVGANHAGTYSINTILDNYGDQNEVVVFDQNSNISFLGCGMALWIGNQISGPDGLFYANKEGLESKGAKVYINSPVESIDFDGKTVTALVDGKEHVESYDKLILATGSQPILPPIDGAEIKEGSRTFEATLENLQFVKLFQNAQEVIDKLNDKSQDIKRVAVVGAGYIGVELAEAFQRHGKEVILIDVVDTCLAGYYDRDFTDRMAKNLEDHGIQLAFGETVKAVEGETKVERIVTDKNAYDVDMVVLAVGFRPNTALGAGKLETFRNGAYLVNKKQETSVKDVYAVGDCATVYDNALDDVNYIALASNAIRSGIVAGHNAGGGDVESNGVQGSNGISIYGLNMVSTGLTEEKAKRFGFNPAVVESTDLQKPPFMKDENEDVTIKIVYDKDTRKVLGAQMVSLMDISMGIHMFSLAIQEGVTIDRLQLLDLFFLPHFNQPLSYIAKAAISAE

SEQ ID NO: 230 - protein, 457 aa, Streptococcus thermophilus JIM 8232
MSKIVVVGANHAGTYSINTILDNYGDQNEVVVFDQNSNISFLGCGMALWIGNQISGPDGLFYANKEVLESKGAKVYINSPVESIDFDGKTVTALVDGKEHVESYDKLILATGSQPILPPIDGAEIKEGSRTFEATLENLQFVKLFQNAQEVIDKLNDKSQDIKRVAVVGAGYIGVELAEAFQRHGKEVILIDVVDTCLAGYYDRDFTDRMAKNLEDHGIQLAFGETVKAVEGETKVERIVTDKNAYDVDMVVLAVGFRPNTALGAGKLETFRNGAYLVNKKQETSVKDVYAVGDCATVYDNALDDVNYIALASNAIRSGIVAGHNAGGGDVESNGVQGSNGISIYGLNMVSTGLTEEKAKRFGFNPAVVESTDLQKPPFMKDENEDVTIKIVYDKDTRKVLGAQMVSLMDISMGIHMFSLAIQEGVTIDRLQLLDLFFLPHFNQPLSYIAKAAISAE

SEQ ID NO: 231 - protein, 461 aa, Streptococcus thermophilus LMG 18311; identical to SEQ ID NO: 229

SEQ ID NO: 232 - protein, 457 aa, Streptococcus thermophilus MN-ZLW-002; identical to SEQ ID NO: 230

SEQ ID NO: 233 - protein, 457 aa, Streptococcus thermophilus MTCC 5460; identical to SEQ ID NO: 227

SEQ ID NO: 234 - protein, 457 aa, Streptococcus thermophilus MTCC 5461; identical to SEQ ID NO: 227

SEQ ID NO: 235 - protein, 457 aa, Streptococcus thermophilus ND03; identical to SEQ ID NO: 230

SEQ ID NO: 236 - protein, 442 aa, Aeromonas hydrophila 4AK4
MRIVIIGGEAAGMSAAAKARRLAKDAEIVVYEASDVISFGACGLPYFVGDDFQEPGYMAEFTPEQFAAKGIEVKTGHRVLSLDATAQTLRVEHKGDSFTDSYDRLMIATGAREQMPPIPGLQQQGVFGLRRMSDGLALKGAVQDPRNKKAVVIGSGFIGLEVVEALVHQGKEVRLIELADRVIPDAFDSEITQHIETELREQGVSLHLGERVQALLGEGQVSGVRTDQGEYEADIVVLCTGVRPNTEFLADTGIERLGNGAIKVDRQGRTSLPNVWSAGDCASVWHSVKQQQVYVPLATIANKLGRMVGENLAGAKQMFPGTLGSAALKVLGLEAGRTGLSEKEAQQLGIDYSTVVIKDKCHTNYCPGQSDIHVKLVYEAGSKRLLGGQILGRKGAVHRIDALAVAITMGVTTDQLGMLDFAYAPPFSRTWDVLNVAGNVAK

SEQ ID NO: 237 - protein, 442 aa, Aeromonas media WS
MRIVIIGGEAAGMSAAAKARRLARDAEIVVYEASEVISFGACGLPYFVGDDFQEPGYMAEFTPEQFAAKGIEVKIGHRVLSVDATAQTLRVEHNGDSFTDRYDRLMIATGAREQMPPIPGLQQQGVFGLRRMSDGLALKTAVQDPCSKKAVVIGSGFIGLEVVEALVHQGKEVRLIELADRVIPDAFDSEITQHIETELREQGVCLHLGERVQALLGEGRVSGVRTDQGEYEADIVVVCTGVRPNTEFLADTGIARLGNGAIKVDRQGRSSLANVWAAGDCASVWHSVKKQQVYVPLATIANKLGRMVGENLAGAEQEFPGTLGSAALKVLGLEAGRTGLSEQEAKAMGIDYRTVVIKDKCHTNYCPGQSDIHVKLVYEAGSKRLLGGQILGRKGAVHRIDALAVAITMGVTTEQLGMLDFAYAPPFSRTWDVLNVAGNVAK

SEQ ID NO: 238 - protein, 442 aa, Aeromonas salmonicida subsp. salmonicida A449
MRILIIGGEAAGMSAAAKARRLAKDAEIVVYEASEVISFGACGLPYFVGDEFQEPGYMAEFTPEQFAAKGIEVKTGHRVLSLDASAGTVQVEHQGDVFTDTYDRLMVATGAREVMPPIPGLQQQGVFGLRRMADGLALKAAVQDKRNTRALVIGSGFIGLEVVEALVHQGKEVRLIELADRVIPDAFDSEITRHIETELREQGVCVHLGERVEALLGDGRVTGVRTDKGEYEADIVVVCTGVKPNTEFLADTGIKRLANGAIEVDRQGRTSLANVWSAGDCASVWHSVKQQQVYVPLATIANKLGRMVGENLAGAEQVFPGTLGSAALKVLGLEAGRTGLSEQEAQAMGIDYRTVVIKDKCHTNYCPGQSDIHVKLVYEAGSKRLLGGQILGRKGAVHRIDALAVAITMGVTTEQLGMLDFAYAPPFSRTWDVLNVAGNVAK

SEQ ID NO: 239 - protein, 442 aa, Aeromonas veronii B565
MRILIIGGEAAGMSAAAKARRLAKDADIVVYEASEVISFGACGLPYFVGDEFQDPGYMAEFTPEQFAAKGIEVKIGHRVLSVDATAQTLQVEHNGDTFTDSYDRLMIATGAREVMPPIPGLQQQGVFGLRRMADGLALKAAVQDKNNRRAVVIGSGFIGLEVVEALVHQGKEVRLIELADRVIPDAFDGEITQHIETELREQGVSLHLGERVEALLGDGRVTGVRTSQGEYEADIVVVCTGVKPNTEFLADTGIERLGNGAIKVDRQGRSSLANVWSAGDCASVWHSVKQQQVYVPLATIANKLGRMVGENLAGAEQTFPGTLGSAALKVLGLEAGRTGLSEQEAKAMGIDYRTVVIKDKCHTNYCPGQSDIHVKLVYEAGSKRLLGGQILGRKGAVHRIDALAVAITMGVTTEQLGMLDFAYAPPFSRTWDALNVAGNVAK

SEQ ID NO: 240 - protein, 432 aa, Bacillus cereus G9241
MSAAMQIVRNDENANVVTLEKGEIYSYAQCGLPYVISGAIASTEKLIARNVKTFRDKYGIDAKVRHEVTKVDTEKKIVYAEHTKTKDVFEFSYDRLLIATGVRPVMPEWEGRDLQGVHLLKTIPDAERILKTLETNKVEDVTIIGGGAIGLEMAETFVELGKKVRMIERNDHIGTIYDADMAEYIHKEADKHHIEILTNENVKAFKGNERVEAVETDKGTYKADFVLVSVGVQPNTDFLEGTNIRTNHKGAIEVNAYMQTNVQDVYAAGDCATHYHVIKEIHDHIPIGTTANKQGRLAGLNMLDKRRAFKGTLGTGIIKFMDLTLARTGLNEKEANGLHIPYKTVKVDSTNMAGYYPNAKPLYLKLLYRSDTKQLLGGQVIGEEGVDKRIDVIAMALFNKMSIHDLEDVDLSYAPPYNSVWDPIQQAARRAE

SEQ ID NO: 241 - protein, 443 aa, Borrelia afzelii PKo
MKIIIIGGTSAGTSAAAKAKRLNKSLDITIYEKTNIVSFGTCGLPYFIGGFFDNPNTMISRTQEEFEKTGISAKTNHEVIKVDTKSNTIVIKNQKTGSIFNNNYDKLMIATGAKPIIPAITNINLKNFYTLRNLEDGQNLKNLMDKEEIKNIVIIGAGYIGIEMIEAAKNKRKNVRLIQLDKHILTDSFDEEIVKIMEEELIEKGVELHTSEFVKSLIGEKRVEGVVTNKNTYQADVVILATGIKPDTEFLENQLKTTTNGAIIVNEYGETSIKNIFSAGDCATIYNIVSKKNEYIPLATTANKLGRVVGENLAGNHVPFKGTLGSASIKILSLEAARTGLTEKDAKKLQINYKTIFVKDKNHTNYYPGQEDLYVKLIYEENTKIILGAQAIGKNGAVIRIHALSIAIYSKLTTKELGMMDFSYSPPFSRTWDILNIAGNAAK

SEQ ID NO: 242 - protein, 443 aa, Borrelia crocidurae str. Achema
MKIIIIGGTAAGTSAAAKAKRINKELNIVIYEKTNTTSFGACGLPYFIGKFFDEPNNMIARTPEQFKQNGISVFPKHEVTKVDIKNNILQVKNLQTQEIFNDTYDKLMIATGGTPIIPPINNIKLKNFYTLRNMKDGKEIRELLNKQEIKNIIIIGAGYIGIEMVEATKAREKNVRIIQLDKRILTESFDKEITNIMEEELIKNNVLLHTNEFVTSLIGKDKVEGIITNKSEYKADLVILSTGIKPATEFLEGQLDTLKNGAIIVNEYGETSAKNIFAAGDCATIYNIISNQNDYIPLATTANKLGKIIGENLAGKRISFKGTLGSASIKVLSLEAARSGLTEEMALKLGIQYKTVFIKDKNHTNYYPNQEDLYIKLIYNQDTKEILGAQIIGKNGAALRMHALSLAIYSKLKINELGMMDFAYSPPFSKTWDALNIAGNAAK

SEQ ID NO: 243 - protein, 443 aa, Borrelia duttonii Ly
MKIIIIGGTAAGTSAAAKAKRINKELNIVIYEKTNTTSFGACGLPYFIGKFFDEPNNMIARTPEQFKQNGISVFPKHEVTKVDIKNNILQVKNLQTQEIFNDTYDKLMIATGGTPIIPPINNIKLKNFYTLRNMKDGKEIRELLNKQEIKNIIIIGAGYIGIEMVEATKAREKNVRIIQLDKRILTESFDKEITNIMEEELIKNNVLLHTNEFVTSLIGKDKVEGIITNKSEYKADLVILSTGIKPATEFLEGQLDTLKNGAIIVNEYGETSAKNIFAAGDCATIYNIISNQNDYIPLATTANKLGKIIGENLAGKRVSFKGTLGSASIKVLSLEAARSGLTEEMALKLGIQYKTVFIKDKNHTNYYPNQEDLYIKLIYNQDTKEILGAQIIGKNGAALRMHALSLAIYSKLKINELGMMDFAYSPPFSKTWDALNIAGNAAK

SEQ ID NO: 244 - protein, 443 aa, Borrelia garinii PBi
MKIIIIGGTSAGTSAAAKAKRLNKKLDITIYEKTNIVSFGTCGLPYFIGGFFDNPNKMISRTPEEFEKTGISVKTNHEVIKVNVKNNTIVIKNQITGSIFNNTYDKLMIATGAKPIIPAINNINLKNFYTLRNLEDGQKIKNLMDKEEIKNIVIIGAGYIGIEMIEAVKNKRKNVRLIQLDKHILIDSFDEEIVKIMEEELIQKGVDLHTSEFVKSLIGGKKVEGVVTNKNTYQADVVILATGIKPATEFLENQLKTSTNGAIIVNEYGETSIKNIFSAGDCATIYNIVSKKNEYIPLATTANKLGRIVGENLAGNHVSFKGTLGSASIKILSLEAARTGLTEKDAKKLQIKYKTIFIKDKNHTNYYPGQEDLYVKLIYEENTKIILGAQAIGKNGAVIRIHALSIAIYSKLTTKELGMMDFSYSPPFSRTWDILNIAGNAAK

SEQ ID NO: 245 - protein, 443 aa, Borrelia recurrentis A1
MKIIIIGGTAAGTSAAAKAKRINKELNIVIYEKTNTTSFGACGLPYFIGKFFDEPNNMIARTPEQFKQNGISVFPKHEVTKVDIKNNILQVKNLQTQEIFNDTYDKLMIATGGTPIIPPINNIKLKNFYTLRNMNDGKEIRELLNKQEIKNIIIIGAGYIGIEMVEATKARKKNVRIIQLDKRILTESFDKEITNIMEEELIKNNVLLHTNEFVTSLIGKDKVEGIITNKSKYKADLVILSTGIKPATEFLEGQLDTLKNGAIIVNEYGETSAKNIFAAGDCATIYNIISNQNDYIPLATTANKLGKIIGENLAGKRVSFKGTLGSASIKVLSLEAARSGLTEEMALKLGIQYKTVFIKDKNHTNYYPNQEDLYIKLIYNQDTKEILGAQIIGKNGAALRMHALSLAIYSKLKINELGMMDFAYSPPFSKTWDALNIAGNAAK

SEQ ID NO: 246 - protein, 462 aa, Intestinibacter bartlettii DSM 16795
MGEILSFGSSSKFKTDLGGNMRIIIVGGIAAGMSAAAKLRRTDRDAEIVVYEKSPHISFGACGLPYYVGGNFDNIDRMLVRTPEKVRETGIDVKVEHEVLSLDVQNKTIKVKDLQSGEIFSDKYDKLMIATGAATIIPPIENIETAYTLRSVEDGEKLKVKMQDESIKKVAVIGAGFIGLEVADVAKELGKEVCVFNMGSRILEKVLDEEVTEILEENLRAHGVELYFNTIVKSLETSPNKTKLITDTDEVEVDLVVLAAGVRPNTSFLKDTGIEMLQNGAIVIDDEGKTSIQDIYAAGDCATVYHLVKEEQVYIPLATNANKLGRIVGSNLGGKNEKFQGTLGSSCIKLLDMEAGATGITEEDAKNMNLNYKSVFIADKNHTDYCPGQEKIYVKLIYNADTKVILGGQVVGKSDAVQRTNVLATAIFAKMTTEQLGMLDLCYAPPFARTWDALNIAGNVSK

SEQ ID NO: 247 - protein, 452 aa, Lactobacillus Sanfranciscensis
  misc_feature (42)..(42): Xaa can be any naturally occurring amino acid
MKVIVVGCTHAGTFAVKQTIADHPDADVTAYEMNDNISFLSXGIALYLGKEIKNNDPRGLFYSSPEELSNLGANVQMRHQVTNVDPETKTIKVKDLITNEEKTEAYDKLIMTTGSKPTVPPIPGIDSSRVYLCKNYNDAKKLFEEAPKAKTITIIGSGYIGAELAEAYSNQNYNVNLIDGHERVLYKYFDKEFTDILAKDYEAHGVNLVLGSKVAAFEEVDDEIITKTLDGKEIKSDIAILCIGFRPNTELLKGKVAMLDNGAIITDEYMHSSNRDIFAAGDSAAVHYNPTNSNAYIPLATNAVRQGRLVGLNLTEDKVKDMGTQSSSGLKLYGRTYVSTGINTALAKANNLKVSEVIIADNYRPEFMLSTDEVLMSLVYDPKTRVILGGALSSMHDVSQSANVLSVCIQNKNTIDDLAMVDMLFQPQFDRPFNYLNILGQAAQAQADKAHK

SEQ ID NO: 248 - protein, 446 aa, Lactococcus lactis subsp. Cremoris
MKIVVIGTNHAGIATANTLLEQYPGHEIVMIDRNSNMSYLGCGTAIWVGRQIEKPDELFYAKAEDFEAKGVKILTETEVSEIDFANKKVYAKTKSDDEIIEAYDKLVLATGSRPIIPNLPGKDLKGIHFLKLFQEGQAIDAEFAKEKVKRIAVIGAGYIGTEIAEAAKRRGKEVLLFDAENTSLASYYDEEFAKGMDENLAQHGIELHFGELAKEFKANEEGYVSQIVTNKATYDVDLVINCIGFTANSALASDKLATFKNGAIKVDKHQQSSDPDVYAVGDVATIYSNALQDFTYIALASNAVRSGIVAGHNIGGKELESVGVQGSNGISIFGYNMTSTGLSVKAAKKLGLEVSFSDFEDKQKAWFLHENNDSVKIRIVYETKSRRIIGAQLASKSEIIAGNINMFSLAIQEKKTIDELALLDLFFLPHFNSPYNYMTVAALNAK

SEQ ID NO: 249 - protein, 446 aa, Lactococcus lactis subsp. cremoris MG1363; identical to SEQ ID NO: 248

SEQ ID NO: 250 - protein, 460 aa, Leptotrichia hofstadii F0254
MKGVYDFINYHAKNIMKIVVIGGGAAGMMFSTQYKKANPEDEIILFEKSSYVAWAGCPTPYFIADELKKSDVLHGTPEDFIKRGIDVKIHHEVTEINFENKTVTVKGNEINGIIFYDKLVIAVGAKSFVPNITGYSKDLENVFTLSHAEHAFKIKDYLNENKSKLKNAVVVGAGFIGLEMAESFRKNGLNVTLIEKADQIFPNVSENLKKRIYKEIENNDVELKLNSGVSEIISENNIAKSVKLDNGETVDFDIALFSIGITPNIDFLPKELKTDSGKIAVNDKFETNIKDVYAIGDCIFNKYYKTDRNLYAPFGDVANKHGMFLAKHLSGKDVSWKGLIRSFATSFYDVKLAQTGLSLKEALQLRYNADVVSMKAMYKNSGFEDSVPASAEIIYDKDRKIVLGGAMVGKEAVAQFVDQMAIVIALETPIEKFIEIDFAYSPTNASVWNPLLVTYRKVIK

SEQ ID NO: 251 - protein, 456 aa, Streptococcus agalactiae A909
MSKIVVVGTNHAGTAAIKTMLSNYGEANEIVTFDQNSNISFLGCGMALWIGEQIDGPEGLFYSDKEQLESMGAKVYMNSPVLNIDYDKKEVTALVDGKEHVESYEKLILATGSQPIIPPIKGVEIQEGSREFKATLENLQFVKLYQNSEEVIEKLAKPGINRVAVVGAGYIGVELAEAFQRIGKEVTLVDVADTCMGGYYDRDFTDMMSKNLEDHGIRLAFGQAVQAVEGDGKVERLVTDKETFDVDMVILAVGFRPNTELGAGKLDTFRNGAWVVDKKQETSVKDVYAIGDCATIWDNSRDDINYIALASNAVRTGIVAAHNACGTELEGAGVQGSNGISIYGLNMVSTGLTLEKAKQAGYNAVETGFNDLQKPEFIKHNNHEVAIKIVYDKDSRVILGCQMVSHEDVSMGIHMFSLAIQEKVTIEKLALTDIFFLPHFNKPYNYITMAALGAKD

SEQ ID NO: 252 - protein, 456 aa, Streptococcus agalactiae CF01173; identical to SEQ ID NO: 251

SEQ ID NO: 253 - protein, 456 aa, Streptococcus agalactiae FSL S3-026; identical to SEQ ID NO: 251

SEQ ID NO: 254 - protein, 456 aa, Streptococcus agalactiae GB00112; identical to SEQ ID NO: 251

SEQ ID NO: 255 - protein, 456 aa, Streptococcus agalactiae SS1014; identical to SEQ ID NO: 251

SEQ ID NO: 256 - protein, 456 aa, Streptococcus agalactiae STIR-CD-17
MSKIVVVGTNHAGTAAIKTMLSNYGEANEIVTFDQNSNISFLGCGMALWIGEQIDGPEGLFYSDKEQLESMGAKVYMNSPVLNIDYDKKEVTALVDGKEHVESYEKLILATGSQPIIPPIKGVEIQEGSREFKATLENLQFVKLYQNSEEVIEKLAKPGINRVAVVGAGYIGVELAEAFQRIGKEVTLVDVADICMGGYYDRDFTDMMSKNLEDHGIRLAFGQAVQAVEGDGKVERLVTDKETFDVDMVILAVGFRPNTELGAGKLDTFRNGAWVVDKKQETSVKDVYAIGDCATIWDNSRDDINYIALASNAVRTGIVAAHNACGTELEGAGVQGSNGISIYGLNMVSTGLTLEKAKQAGYNAVETGFNDLQKPEFIKHNNHEVAIKIVYDKDSRVILGCQMVSHEDVSMGIHMFSLAIQEKVTIEKLALTDIFFLPHFNKPYNYITMAALGAKD

SEQ ID NO: 257 - protein, 456 aa, Streptococcus agalactiae ZQ0910; identical to SEQ ID NO: 251

SEQ ID NO: 258 - protein, 440 aa, Vibrio campbellii HY01
MKVVVVGGSAAGMSFAAKYKRNQPSDEVIVLDKRDYISFGACGLPYFAGGMFDDTERMISRTPEQAIKSGLDVRIETEMVALDRSEKQIKVRHQGDESTINYDMLVIATGARPIVPSFGEFNPEHVYTLTSMEDGLAVKEALKDSNKQRVCVIGGGFIGLEVFDAAHLLGKHVTIIEREQHVMSRQFSPEMIEVVEGAIRESGAELKTGCSVSAIRDAEQGGYIVETDNGNVEADVVIMSLGFKPNTEAFELPKAANGALLVDEFGATEDAHIYAAGDCAVVHHMALGKSVYVPLATTANKQARMMADKLAGKDTYMSGFLGSSCLKVLDYELACTGVSELLAKEHGLEVKVSTISDKNQTDYYPGQEDIKVKLVYHPETNVLLGGEIVGKKGAVGRINALAVAITAKMTTQQLGYMDFCYAPPFARTWDALNVAGNVAK

SEQ ID NO: 259 - protein, 448 aa, Clostridium aminovalericum NRIC0223; identical to SEQ ID NO: 6

SEQ ID NO: 260 - protein, 453 aa, Lactobacillus rhamnosus
MKILVIGATHAGTFATQQILTDHPDAEVTVYERNNNLSFLSCGIALWVGDHVSDPDKMFYSSPEALAKLGANMQMEHDVLNIDPATKTVEVKDLKTGTVTTDTYDKLVYTTGSTPIIPNIPGIHDSNVYLCKNWSDAKTLKDLAPSIKSAIVIGAGYIGAELAEQFALTDKEVTLIDGLPRVLAKNFDATITDRVEKLYTDHGVHLALNEMVTEFAQADQGIKVTTNKGDYTADIAILCTGFRPNTDLLKDHLDTLPNGAVITNAYMQTSDPDIFAAGDTATVHYNPTGKNDYIPLATNAVRQGILVGKNIMTPTEKYLGTQSSSAVELFDHAIAASGLTVEGAHTRGLELDSVTIEQDYRPDFMLTTTPVLCSLTWDPKTHEVKGGAFFSKHDISQSANVISLAIQTHMTIETLAMVDMLFQPNFDQPINWVNAVAMAAVDKAKKKPTTPVA

SEQ ID NO: 261 - protein, 453 aa, Lactobacillus rhamnosus ATCC 53103; identical to SEQ ID NO: 260

SEQ ID NO: 262 - protein, 446 aa, Lactococcus lactis MG1363; identical to SEQ ID NO: 248

SEQ ID NO: 263 - protein, 456 aa, Streptococcus agalactiae; identical to SEQ ID NO: 251

SEQ ID NO: 264 - protein, 457 aa, Streptococcus mutans NCBI 11723; identical to SEQ ID NO: 43

SEQ ID NO: 265 - protein, 446 aa, Enterococcus faecalis
MKVVVVGCTHAGTSAVKSILANHPEAEVTVYERNDNISFLSCGIALYVGGVVKNAADLFYSNPEELASLGATVKMEHNVEEINVDDKTVTAKNLQTGATETVSYDKLVMTTGSWPIIPPIPGIDAENILLCKNYSQANVIIEKAKDAKRVVVVGGGYIGIELVEAFVESGKQVTLVDGLDRILNKYLDKPFTDVLEKELVDRGVNLALGENVQQFVADEQGKVAKVITPSQEFEADMVIMCVGFRPNTELLKDKVDMLPNGAIEVNEYMQTSNPDIFAAGDSAVVHYNPSQTKNYIPLATNAVRQGMLVGRNLTEQKLAYRGTQGTSGLYLFGWKIGSTGVTKESAKLNGLDVEATVFEDNYRPEFMPTTEKVLMELVYEKGTQRIVGGQLMSKYDITQSANTLSLAVQNKMTVEDLAISDFFFQPHFDRPWNYLNLLAQAALENM

SEQ ID NO: 266 - protein, 484 aa, Giardia lamblia ATCC 50803
MQNVKLTLQDINLINLTFGDQKQRRAMKVIILGCNHGGTAVAKTIKQHDPSIEVSIYERNDNLSFLSCGIALGVHGTVKDMESLFYSNPDDLAGLGCVCHMQYNVTDIDFTTKKLTAVSLVTNETVTERYDKIVFATGSWPIIPDIPGIKSDKVLLCKNYMHAKKIVETFSHEENTKHCVVIGAGYIGVELAEAFGLKNQPCTLIDGSGRIMSRNFDKEFTDICEDEMRAHGVQLQMGERLEAFDEDDGKIVVRTSKGVYSGDAAILCIGFRPVTEMILESAERHGVKLDVHHPSKAIIIDECARTSLPGVYAIGDCATIHYTVTDEDRYMPLATNAIRTGLAAAAHILKLKHLRLIGTEGTSGIRIFKHHMASTGLTEEGALLAGIKNVKSVIINDTDRPGFMPTNANVMVKLVYDGDTHRVLGGQMMSEASVNQVMNALAVCIQNRYTIEKMAVQDFFFQPHYNNPWNTLNVAAISAINKKD

SEQ ID NO: 267 - protein, 458 aa, Giardia lamblia P15
MKVIILGCNHGGTAVAKTIKQHDPSIEVSIYERNDNLSFLSCGIALGVHGTVKDMESLFYSNPDDLAGLGCVCHMQYNVTDIDFTTKKLTAVSLVTNETVTEKYDKIVFATGSWPIIPDIPGIKSDKVLLCKNYMHAKKIVETFSHEENTKHCIVIGAGYIGVELAEAFGLKNQPCTLIDGSGRIMSRNFDKEFTDICEDEMRAHGVQLQMGERLEAFDEDDGKIIVRTSKGVYSGDAAVLCIGFRPVTEMILESAERHGVKLDVHHPSKAILIDECARTSLPGVYAIGDCATVHYTVTDEDRYMPLATNAIRTGLAAAAHILKLKHLRLIGTEGTSGIRIFKHHMASTGLTEEGALLAGIKNVKSIIVNDTDRPGFMPTNAKVMVKLVYDGDTHRVLGGQMMSEASVNQVMNALAVCIHNRYTIEKMAVQDFFFQPHYNNPWNTLNVAAISAINNKD

SEQ ID NO: 268 - protein, 458 aa, Giardia intestinalis ATCC 50581
MKVIILGCNHGGTAVAKTLKQHNPEIEVSIYERNDNLSFLSCGIALGVHGTVKDMESLFYSNPDDLSSLGCVCHMQHDVTDIDFTLKKLTAVNLVTNETVIESYDKIVFATGSWPVIPNIPGIKNEKVLLCKNYMHAKKIVETFSHEENTKHCIVIGAGYIGVELAEAFGLKGQPCTLIDGSARIMSRNFDKEFTDVCEEEMRAHGVQLQLGERLEAFDEDNGKIVVKTNHGAYTGDAAILCIGFRPVTEMILESARRHNVTLNVHEPSKAIIIDECARTNLPGVYAIGDCATIHYTVTDEDRYMPLATNAIRTGLAAAAHILKLKHLRLIGTEGTSGIRVFKHHMASTGLTEETAALSNIENVKTVVVTDTDRPGFMPTNANVIVKLVYDGTTHRILGGQMMSEASVNQIMNALAVCIQNRYTIEKMAVQDFFFQPHYNNPWNTLNVVAISAINSKN

SEQ ID NO: 269 - protein, 871 aa, Trichomonas vaginalis
MLKIQQLTEDIYWLGALDPTLAVFDIIMETKYGTTYNAYMIKTPAGAVLVETVKECFFEEYIEKVKSVIGDINNIKYLITNHTEPDHSGSIKKIIEIIPGLTVIGSKTALTYLEDIVNIPFRGHSAEDLKALKFGGKTFEFISCPFLHWPDSMYTWLPEEQALFTCDSFGAHYSPKKSILMSELPPEEEDGYQEALLYYYTAIFGPFKDFVIKGTDKILDLDIKIICLGHGPVLDARVQETIDTYRKWSEPALPHPGIEVVMVYASAYGYTTEMAEEIKNGILDKIPDASVKMYNVNIQNYGGMKADIMNSIATADGVLLGTNTINGDAVPPIWDVALSMNPIVHGGKIVTAFGSYGWSGEGVDNIINRFDKIRCKVVEPIKIKFRMSKKEHKQVREFGRRFADCLESGEVPDRAVPGRVVGAKDWSELNPTGAIVLWRCVICGEIYAGVTPPLVCPACGVGQDLFELYEAEEVTCSSFENLKFVVVGSGAAAVSAIDAIRARNTVASITMLTREKIMPYYRPIIVDALNSEISPENYYLKNEDWYTENNITVKLGTTVKSIDTARKSLTLSDGSTMQYDRLILATGSRPFVPPIGHEGLTGVYVIRTSNDVELLKETCKTAKKAVVIGGGVLGLENASAIKDRGLSVTVVECMPRLMARQLDPEASEILQGFVRDYGVDLRMGQCVVIKGDGKKVTGVQVGDEFISADFVVVNAGVRAESEVAAAAGIECSRGITVNNKMETSAQDVYAAGDCAYMENINQGLWAPALAMGKVAGANAAGDSKTFHFSIEPVNMIAMGTDLFAVGIPPDSPKGYNVISQRDEKEGTAIKLYFKDNRLVYAAGFKCQKQSGFLLKGVRNGHTLQHVLAELF

SEQ ID NO: 270 - protein, 871 aa, Trichomonas vaginalis
MLKIQQLTEDIYWLGVLDSNLAVFDIIMETKYGTTYNAYLIKTPEGAVLVETVKETFFDEYIEKVKSVIGDIHKIKYLITNHTEPDHSGSIKKMIELIPDLTVVGSKTALTYLEDIVNIPFKGHSAEDLKVLKFGGKSFEFISCPFLHWPDSMYTWVPEEKTLFTCDSFGAHYSPKKSILMSQLPPEEEEGYQDALLYYYTAIFGPFKEYVIKGTDKILNLDIKLVGLGHGPVLDARIKETIDTYRKWSAPLPTHEGKEVVMVYASAYGYTTEMAEEIKAGILAKIPDAKIKMFNVNIQNYGGLKGEIMNAIATADGVLLGTNTINGDAVPPVWDVALSMNPIVHGGKIVTAFGSYGWSGEGVDNIIARFDQIRCKVIDGCKIKFRMSKKEHGKVNEFGQQFGEALITGKVPERAVPGKVVGAKDWSELNPTGAVVLWRCVICGEIYAGVTPPLQCPACGVGQDLFELYEAEQVTHKSTEPLNYVIVGSGAAAVASIEAIRARNAVAKITMISREKVMPYYRPIIVDALNAEIAPDKYFLKNEEWYKENKIEIKLDTSVTAIDTKAKKVKLCRGDELAYDKLILATGSRPFIPPIGHEGLSGVIVIRTSADVDQLKAACQTAKKAVVIGGGVLGLENASAIKEKGVAVTVVECMPRLMARQLDTEASAVLLEEVKKFGVDVRLGMTVSIKGDGKHVTGVQVGEEFIPADFVVVNAGVRAESEVAAAAGIKCGRGIIVNNKMETNVPDVYAAGDCAFLDNMNQGLWAPALAMGKVAGANACGDNKTFAFAIEPVSMIAMGTDLFACGNPPESAQGYNVVSQKDDKEGSAIKLYFKDNRLVYAAGFRIQKISGSLLKGVREGRSLERIMAEIF

SEQ ID NO: 271 - protein, 871 aa, Trichomonas vaginalis
MLKIQQLTEDIYWLGVLDSDLAVFDIVMETKYGTTYNAYLIKTPEGAVLVETVKERFFDEYIDKVKTVIGDIKNIKYLITNHTEPDHSGSIKRMVELLPDVTVVGSKTALTYLEDIMNIPFKSQSAEDLKVLKFGGKTFEFISCPFLHWPDSMYTHLVEEKTLFTCDSFGAHYSPKKSILMSQLPPEEEEGYQDALLYYYTAIFGPFKEYVIKGTDKILNLDIKLICLGHGPVLDARIKETIDTYRKWSAPIPPHEGKEVVMVYASAYGYTTEMAEEIKTGIMEKCPDAKVKMFNVNIQNYGALKGEIMGAIATADGVLLGTNTINGDAVPPIWDVALSMNPIVHGGKVVSAFGSYGWSGEGVDNIIKRFDQIRCKVIDGMKIKFRMSKKEHEKVREFGNQFGNSLVTGVVPERAVPGKVVGAKDWSQLNPTGQIVLWRCVICGEIYAGVTPPAQCPACGVSEDLFELYEGEEIAVKSTEKLNFVVVGSGAAAVAACEAIRQRNSAASIQMITREKIMPYYRPIIVDALHGPIPDDQYWIKPEQWYKDNKIDVMLDTNVTSVDSKAKKVKLCCGKEVAYDKLILCTGSKPFVPPLGQEGLEGVLVIRTYLDVETLCKKCETAKSVVVIGGGVLGLENASNLEKKGLKVTVIECMPRLMSRQLDPEGSHFLEDAVRKYGINLKLGHAVGIKSDGKNVTGVQVGDEFVPADFIVINAGVRPECDVAKTGGVEIGRGISVNEKMETNIPDIYAAGDCAYLKNFNQGLWAPALAMGKVAGANAAGDDKTFSFAKEPVNMLAFNTDLFSIGCPPESEKGYNVIGQRDDKEGTLMRLYFQDNRLVYACCFKMQKISGALLKAAREGHSMQRVVAEVF

SEQ ID NO: 272 - protein, 573 aa, Synechocystis PCC6803
MFTTPLPPQKRLSTQTEAIAKNITAIRSLDWDRDRFDIEFGLQNGTTYNSYLIQADKVALVDSSHEKFRQLYLDLLQGLIDPQRIDYLIVSHTEPDHSGLVKDILQLNPRITVVATKVALQFLDNFVHQPFERIQVKSGDRLDLGQGHDLEFVSAPNLHWPDTMLTYDPATEILFTCDVFGMHYCSDAVFDIDLGKIAPDYQFYYDCLMGPNARSVLAAMKRMDNLGTISTVANGHGPLLRHNVGELLHRYRHWSESQSKAEKTVVVFYVADYGYGDRLSQAIAKGITKTGVGVDMVDLSSADPQEIQELVGHASGVVLGMPPLQANADLSTNFGAVLAAMQPKQVFGLYESYGGDDEPIDPLRTKFLDLGLREAFKVIKVKDTPSESTYQLCDESGTDLGQNLIQAAKIKQLKSLDSDLEKAIGRISGGLYIITAQKGEVKGAMLASWVSQASFNPPGFTVAVAKDRAIESLMQVGDRFVLNILEEGNYQILMKHFLKRFPPGADRFAGVKTQTASNGSPILTDALAYLECEVASRMECSDHWIVYSQVTNGRVAKAEGLTAVHHRKVGNYY

SEQ ID NO: 273 - protein, 578 aa, Synechocystis PCC6803
MVTLIDSPTSAAVQPRLTLQTADIAAHTTAIRCLDWDRDRFDIEFELRHGTTYNSFLIRGEKTALIDTSHRKFEAVYLQLLQDLVDLRSLDYLIVNHTEPDHSGLIPDLLELAPQVTVVGSKVAIQFLEKLVHRPFESQIVKSGHSLDLGQGHELQFISAPNLHWPDTILTYDSGTQVLYTCDVFGMHYCDDSLFDETPERLEPDFQYYYNCLMGSNARSVLMALKRIAPLQVVLVATGHGPLLQHHISHWLGQYDAWSQNQVKAETFVALFYVDGYGVSDRLVQTIADGISKTGVAIELVDLSVADTHEVRTLAQCAAGLVVGMPPQSSTSTTLDPLLGTILAAVHPKQVIGLFESGGGQDEPIYPLRNRFQELGLQEAFEPILLKTEPTAATDQLCREAGTDLGQYLTQKQSQQANTDLDPELNQAIGRLSTGLYILTAQKGDVRSAMLASWVIQGSFEPLGIVIAVAKDRAIESLLHPGDTFVLNVLEEDNYQSLMRHFLLRFPPGADRFAGVNTYPAQNGSPILLETLAYLECEVTSRLDGNDHWLVYSTIQTGRVAKLNALTATHHRKLGNHY

SEQ ID NO: 274 - protein, 441 aa, Salmonella enterica
MTQYQVLIIGFGKAGKTLAATLAKTGWRVAIIEQSASMFGGTCINIGCIPTKTLVHDAEREGDFSVAMQRKAAVVNFLRDKNFHNLADLDNVDVIEGRAEFIDNHTLRVFQADGERVLRGEKIFINTGAESVIPAITGLTTTAGVFDSTGLLSLSQRPARLGILGGGYIGLEFASMFANFGTKVTIFEAAPQFLPREDRDIAQAITRILQEKGVELILNANVQAVSSKEGAVQVETPEGAHLMDALLVASGRKPATAGLQLQNAGVAVNERGGIIVDDYLRTTADNIWAMGDVTGGLQFTYISLDDFRIVRDGLLGDGKRSTRDRQNVPYSVFMTPPLSRVGLTEEQARASGATVQVVTLPVAAIPRARVMNDTRGVLKAVVDVNTQRIVGVSLLCVDSHEMINIVKTVMDADLPYTVLRDQIFTHPTMSESLNDLFSLIK

SEQ ID NO: 275 - protein, 413 aa, Echinococcus multilocularis
MGMCSFFSITLLFTVWLSRASVLDLNTANFLDVLKAHEFVLVNFYAEWCRFSRDLAPIFMSTGESVAQEFKDGKVVLGRVDCDDQGALCMSQGVSKYPTLRLFKFTRRYGSEYRNQRSVEAFLTYLREQTADPVKKLNSAMDVGGLTTPRNMVGIFPSFTSDNAAYMNFYMASHLVGDCTFYGVADKNATASVIKFLLKKYPPTEDAKPQQLTLVKEEQATVETVTDFEALRSWAVERCTPLVRELTFANAEEITEPRLPLLILFYPPNNFTAAMRFGVLMEEHFSDLKGRFVPLVANGEVFSHPLLHMGKTMHDLPLMAIDSFQHMFLYPGNLDEALKDPKHINQFLADLASEKLHRQFHGFFEPPSEVPQKPPSEDKDRKAEEAKQSAPTSSVFKLLTPSSNRYSLLRDEL

SEQ ID NO: 276 - protein, 554 aa, Lactobacillus fermentum
MDQEHIYDLIIIGAGPAGLSAGIYAGRATLDTLILEADTVGGQVTTTSIVYNYPAAPAIDGTKLANQMQKQAADFGVTIKRDGVQEVQLDGEIKVITTKSGHQYQARSVVVATGAHPRKVGFKGEDEFRGRGVAYCSTCDGELFSGLQVFVVGGGYAAAEEADYLTRYAKHVTVLVRGDHFSCPPLTASRALDNPKVSVEYNTEIKEVSGDTYLTAMTLVNNQTGQEQTYQVEEGDKTFGVFVYVGTEPETNLFKGQLDLDSHGYILADEQCATNIAGVYAAGDVLAKELRQIITAASDGALAATNAEAYVTAEKKRLGIPVHVTPAKPAAKTVGQTSQVADQPAPQHTGDWFTPDLVEQLKAIFGRLTKDVTLQVLGDDSPLSQELTSFVDELAKLDSHLQVATAPVPADLDLAPQLRLLVDGLDTGLHFAGVPTGHEINSLILGIYNVAGPGQEIAPELVERIKALPATEIEIGVSLTCHFCPDVVAACQRMASLNPQVTATMIDLQHFPQLREERQIMSVPATMIDGGPVIFGSQTLEELVQAAEQATVKS

SEQ ID NO: 277 - protein, 700 aa, Dinoroseobacter shibae
MLKSLETQLLESRWDDEVAKGMSESELLLYRSNILGADKRVTNYGGGNTSAKVMEADPLTGAQVEVLWVKGSGGDIGSIKMDGFATLYMDKLRALKGLYRGVAFEDEMVSYLPHCTFRLNPRAASIDTPLHAYVPRKHVDHVHADAIIAIAASDNSKELTQEIFGNRIGWLPWKRPGFELGLWLEKFCRENPEADGVVLESHGLFTWADTAKECYDQTIDVINVATRWLAERSAGVPAFGGAIHESLPAAARREVAARLMPAIRGFVSDNQHMVGHFNDSDAVLEFVNARDMEALAALGTSCPDHFLRTKIRPLVVPFDPAQNNILAVLSELPDQVAAYREAYAAYYARCKHDDSPALRDPNAVVYLVPGVGMITFAKDKATARISGEFYVNAINVMRGASAVSTYQGLPEQEAFDIEYWLLEEAKLQRMPKPKSLAGRVALVTGGAGGIGAATAERFLAEGACVVLADINEDSLASTQERLSERFGADVVRSVVMNVTREEAVAAAFAEASVEFGGVDILVSNAGIASSAPIEETSLALWNKNMDILSTGYFLVSRAAFKLMRVQDMGGAVVFVASKNGLAASPNAAAYCTAKASEIHLARCLALEGAEAGIRVNVVNPDAVLRGSKIWEGDWLEQRAGTYGTDKDGLEEMYRQRSLLKRSVLPEDIAEACYFFAADASSKSTGNIINVDAGNVQAFTR

SEQ ID NO: 278 - protein, 8 aa, Bacterial
  MOD_RES (3)..(5): Xaa is Ala, Cys, Asp, Glu, Phe, Gly, His, Ile, Lys, Leu, Met, Asn, Pro, Gln, Arg, Ser, Thr, Val, Trp, Tyr, Asx, or Glx
  MOD_RES (6)..(6): Xaa  is Ala or Gly
  MOD_RES (7)..(7): Xaa is Ala, Cys, Asp, Glu, Phe, Gly, His, Ile, Lys, Leu, Met, Asn, Pro, Gln, Arg, Ser, Thr, Val, Trp, Tyr, Asx, or Glx
TGXXXXXG

SEQ ID NO: 279 - protein, 15 aa, Artificial Sequence
  Synthetic Construct
RQIKWFQNRRMKWKK

SEQ ID NO: 280 - protein, 11 aa, Artificial Sequence
  Synthetic Construct
YGRKKRRQRRR

SEQ ID NO: 281 - protein, 18 aa, Artificial Sequence
  Synthetic Construct
RGGRLSYSRRRFSTSTGR

SEQ ID NO: 282 - protein, 10 aa, Artificial Sequence
  Synthetic Construct
RRLSYSRRRF

SEQ ID NO: 283 - protein, 12 aa, Artificial Sequence
  Synthetic Construct
PIRRRKKLRRLK

SEQ ID NO: 284 - protein, 12 aa, Artificial Sequence
  Synthetic Construct
RRQRRTSKLMKR

SEQ ID NO: 285 - protein, 15 aa, Artificial Sequence
  Synthetic Construct
RRRRNRTRRNRRRVR

SEQ ID NO: 286 - protein, 19 aa, Artificial Sequence
  Synthetic Construct
KMTRAQRRAAARRNRWTAR

SEQ ID NO: 287 - protein, 13 aa, Artificial Sequence
  Synthetic Construct
TRRQRTRRARRNR

SEQ ID NO: 288 - protein, 13 aa, Artificial Sequence
  Synthetic Construct
GRKKRRQRRRPPQ

SEQ ID NO: 289 - protein, 13 aa, Artificial Sequence
  Synthetic Construct
GRRRRRRRRRPPQ

SEQ ID NO: 290 - protein, 27 aa, Artificial Sequence
  Synthetic Construct
GWTLNSAGYLLGKINLKALAALAKKIL

SEQ ID NO: 291 - protein, 17 aa, Artificial Sequence
  Synthetic Construct
KLALKLALKLALALKLA

SEQ ID NO: 292 - protein, 27 aa, Artificial Sequence
  Synthetic Construct
MGLGLHLLVLAAALQGAWSQPKKKRKV

SEQ ID NO: 293 - protein, 27 aa, Artificial Sequence
  Synthetic Construct
GALFLGWLGAAGSTMGAWSQPKKKRKV

SEQ ID NO: 294 - protein, 27 aa, Artificial Sequence
  Synthetic Construct
GALFLGFLGAAGSTMGAWSQPKKKRKV

SEQ ID NO: 295 - protein, 27 aa, Artificial Sequence
  Synthetic Construct
GALFLGFLGAAGSTMGAWSQPKSKRKV

SEQ ID NO: 296 - protein, 21 aa, Artificial Sequence
  Synthetic Construct
KETWWETWWTEWSQPKKKRKV

SEQ ID NO: 297 - protein, 21 aa, Artificial Sequence
  Synthetic Construct
KETWFETWFTEWSQPKKKRKV

SEQ ID NO: 298 - protein, 24 aa, Homo sapiens
MLATRVFSLVGKRAISTSVCVRAH

SEQ ID NO: 299 - protein, 30 aa, Artificial Sequence
  Synthetic Construct
MLRFTNCSCKTFVKSSYKLNIRRMNSSFRT

SEQ ID NO: 300 - protein, 19 aa, Artificial Sequence
  Synthetic Construct
MLSARSAIKRPIVRGLATV

SEQ ID NO: 301 - protein, 24 aa, Artificial Sequence
  Synthetic Construct
MLSARSAIKRPIVRGLATVSSFRT

SEQ ID NO: 302 - protein, 27 aa, Artificial Sequence
  Synthetic Construct
MLRSSVVRSRATLRPLLRRAYSSSFRT

SEQ ID NO: 303 - protein, 27 aa, Artificial Sequence
  Synthetic Construct
MLRFTNCSCKTFVKSSYKLNIRRMNTV

SEQ ID NO: 304 - protein, 19 aa, Artificial Sequence
  Synthetic Construct
MLSARSAIKRPIVRGLATV

SEQ ID NO: 305 - protein, 19 aa, Artificial Sequence
  Synthetic Construct
MLSRRSAIKRPIVRGLATV

SEQ ID NO: 306 - protein, 19 aa, Artificial Sequence
  Synthetic Construct
MLSASSAIKRPIVRGLATV

SEQ ID NO: 307 - protein, 19 aa, Artificial Sequence
  Synthetic Construct
MLSARSARKRPIVRGLATV

SEQ ID NO: 308 - protein, 19 aa, Artificial Sequence
  Synthetic Construct
MLSARSAICRPIVRGLATV

SEQ ID NO: 309 - protein, 19 aa, Artificial Sequence
  Synthetic Construct
MLSTAYAIKRPIVRGLATV

SEQ ID NO: 310 - protein, 19 aa, Artificial Sequence
  Synthetic Construct
MLSARSAIPIPIVRGLATV

SEQ ID NO: 311 - protein, 26 aa, Artificial Sequence
  Synthetic Construct
MLSARSAIKRPIVRGYKLNIRRMNTV

SEQ ID NO: 312 - protein, 26 aa, Artificial Sequence
  Synthetic Construct
MLSARSAIKRPIVRGKRPIVRGLATV

SEQ ID NO: 313 - protein, 25 aa, Artificial Sequence
  Synthetic Construct
MLSFTNCSCKTFVKSSYKLNIRRMN

SEQ ID NO: 314 - protein, 25 aa, Artificial Sequence
  Synthetic Construct
MLRFRNCSCKTFVKSSYKLNIRRMN

SEQ ID NO: 315 - protein, 25 aa, Artificial Sequence
  Synthetic Construct
MLRFTNCSKKTFVKSSYKLNIRRMN

SEQ ID NO: 316 - DNA, 1490 bp, Artificial Sequence
  Synthetic Construct
gcggccgcatgctcgctacaagggtctttagcctcgtcggaaagagagctatcagcacctccgtctgcgtgagagctcataaggtcaccgtggtcggatgcacccatgccggcaccttcgccatcaagcaaatcctcgctgagcaccctgacgccgaggtcaccgtctacgagaggaacgatgtgatctccttcctgtcctgtggcatcgccctctacctgggcggaaaagtggccgatccccaaggcctcttctacagctcccctgaagaactgcagaagctgggcgctaatgtgcagatgaaccacaacgtgctggccatcgaccctgaccaaaagaccgtcacagtcgaggacctcaccaatcacgcccagaccaccgagtcctacgacaaactggtgatgacctccggaagctggcctatcgtgcccaaaatccccggcatcgacagcgatagggtgaagctctgcaagaattgggcccacgcccaggctctgattgaggacgccaaggaggccaagaggatcaccgtcatcggcgccggatacatcggagccgaactggccgaggcctactccacaacaggccacgacgtcaccctgattgacgccatggctagggtcatgcccaagtacttcgatgccgacttcaccgacgtcatcgaacaggactacagggaccatggcgtgcaactcgctctgggcgagacagtggagagcttcaccgacagcgccaccggcctcacaatcaagacagacaagaactcctatgagaccgacctggccatcctctgcattggctttaggcccaacacagacctgctgaaaggcaaagtggacatggcccctaacggcgccatcattaccgacgactacatgaggtccagcaaccctgatattttcgctgctggcgactccgccgccgtccattacaaccccacacaccaaaacgcctacattcccctcgctaccaacgccgtcaggcagggaatcctcgtcggaaagaacctcgtcaagcccacagtgaagtacatgggaacccagtccagctccggactggccctctatgacaggacaattgtctccacaggcctcacactggccgccgccaagcaacaaggcctcaatgccgagcaggtcatcgtggaggacaactataggcccgagttcatgccttccaccgagcccgtcctcatgagcctggtcttcgaccccgatacacacagaatcctgggaggcgccctgatgtccaaatacgacgtgtcccagagcgctaataccctgtccgtctgcatccagaacgagaacaccatcgatgacctggccatggtggacatgctgttccagcccaatttcgacaggcccttcaactacctgaacattctcgcccaggctgcccaagctaaagtggcccaatccgtcaacgctggtggatctggtggatctggtggatctatggattacaaggatgacgatgacaagtaaacgcgt

SEQ ID NO: 317 - DNA, 1478 bp, Artificial Sequence
  Synthetic Construct
gcggccgcatgctggccaccagggtctttagcctggtgggcaaaagagccatctccacatccgtctgcgtgagagcccataagattgtcgtcatcggcaccaatcacgccggcattgctaccgccaacacactcctggagcagtaccccggccatgaaattgtcatgattgatagaaactccaatatgagctacctgggctgtggcaccgctatctgggtgggcaggcagatcgagaaacccgacgagctgttttacgccaaggccgaagactttgaggccaagggcgtgaagatcctcaccgagaccgaagtctccgagattgacttcgccaacaagaaggtctatgccaagaccaagagcgatgacgagatcatcgaggcctacgataaactcgtgctcgccacaggcagcagacctatcatccccaacctccccggaaaggacctgaagggaatccacttcctcaagctgttccaggaaggacaggccatcgacgccgagttcgccaaggagaaggtcaagaggattgctgtgatcggcgccggctatatcggcaccgagatcgccgaggccgctaaaaggaggggcaaggaagtcctgctgttcgacgccgaaaacacctccctggccagctactacgacgaagagtttgccaaaggcatggacgagaacctcgcccaacacggaattgaactccacttcggcgagctggccaaagagttcaaggccaacgaggagggctacgtgtcccagatcgtgaccaacaaggccacatacgatgtcgacctggtgatcaactgcatcggctttacagccaactccgctctggcctccgacaagctggccaccttcaagaacggcgccatcaaagtggacaagcaccagcagagctccgaccccgatgtctatgctgtgggcgacgtggccaccatctacagcaacgccctccaggacttcacatatatcgccctggccagcaacgctgtgagatccggcatcgtcgctggccataatatcggaggcaaggagctggagagcgtcggagtccagggcagcaacggcatctccatcttcggctataacatgaccagcacaggcctgtccgtgaaggccgccaagaaactcggcctggaagtgagcttcagcgactttgaggacaagcagaaggcctggttcctgcacgagaacaacgatagcgtgaagatcagaatcgtgtatgagacaaaaagcagaaggatcatcggcgcccagctggcctccaagtccgaaatcatcgctggcaacatcaacatgtttagcctggccatccaggagaagaaaaccatcgacgagctcgccctgctggatctcttcttcctgccccacttcaacagcccctacaactacatgaccgtggccgctctcaacgctaaaggtggatctggtggatctggtggatctatggattacaaggatgacgatgacaagtaaacgcgt

SEQ ID NO: 318 - DNA, 1517 bp, Artificial Sequence
  Synthetic Construct
gcggccgcatgctcgccaccagagtgttcagcctggtgggcaaaagggccatttccacctccgtgtgcgtgagagcccacagcaagatcgtggtggtgggcgctaaccacgctggcaccgcctgcatcaacaccatgctggacaatttcggcaacgagaacgagattgtcgtgttcgaccagaacagcaatatcagcttcctgggatgcggcatggccctgtggatcggcgagcaaatcgatggcgccgagggactgttctacagcgacaaggagaagctggaggccaagggcgccaaggtgtacatgaacagccccgtgctctccatcgactatgacaataaggtggtgaccgccgaggtcgagggcaaggagcataaggagagctacgagaagctgatctttgccacaggatccacccccatcctgcctcccatcgagggagtggagatcgtcaagggcaacagagagttcaaggccaccctggaaaacgtccaattcgtcaaactgtaccagaacgccgaggaagtgatcaacaagctgagcgacaagtcccagcacctggatagaatcgccgtggtcggaggcggctatatcggcgtggagctcgccgaagccttcgagaggctgggcaaggaggtggtgctggtggacatcgtggacaccgtgctgaatggatactacgacaaggacttcacccagatgatggccaagaacctggaggaccataacatcaggctcgctctgggccaaaccgtgaaggctatcgagggcgacggcaaggtcgagagactgattacagataaggaaagcttcgacgtggacatggtgattctggccgtgggctttaggcccaacaccgctctggccgacggcaagatcgaactcttcaggaacggcgccttcctggtggacaagaagcaggaaaccagcatccccggagtgtacgccgtcggcgattgcgctaccgtgtatgacaacgccaggaaagacaccagctacatcgctctggccagcaatgccgtgaggaccggcattgtcggcgcttacaacgcctgcggccacgagctggagggcattggagtccagggatccaatggaatcagcatctacggcctgcacatggtgtccaccggcctgacactggaaaaggccaaagccgctggctataatgccaccgagacaggcttcaatgatctccagaagcccgagttcatgaagcacgacaaccacgaagtcgccatcaagatcgtcttcgacaaggactccagagagatcctgggcgcccagatggtgagccacgacatcgccatctccatgggcatccacatgtttagcctggccatccaagagcacgtgacaatcgacaagctggccctgaccgacctgtttttcctgccccactttaacaagccctacaactacattaccatggctgccctgaccgccgagaagggtggatctggtggatctggtggatctatggattacaaggatgacgatgacaagtaaacgcgt

SEQ ID NO: 319 - DNA, 1511 bp, Artificial Sequence
  Synthetic Construct
gcggccgcatgctggccaccagagtgtttagcctggtcggaaagagggccatcagcaccagcgtctgcgtcagggcccatagcaagatcgtgatcgtcggagctaaccacgctggcaccgctgccatcaataccgtcctcgacaactacggcagcgagaacgaagtcgtggtgtttgaccagaactccaacatctccttcctcggctgtggaatggctctgtggattggcaagcagatcagcggcccccagggactcttctacgccgacaaggaatccctggaggctaagggcgccaaaatctatatggagtcccccgtcacagctattgactacgacgccaagagggtcacagccctggtgaacggccaagagcatgtggagagctacgaaaagctgatcctcgccaccggcagcacacctattctgccccccattaaaggcgccgctatcaaggagggctccagggacttcgaagctaccctgaagaacctgcagttcgtgaagctctaccagaacgccgaggacgtgatcaataagctgcaggacaagacccagaacctgaataggatcgccgtggtcggcgctggctacatcggagtcgagctggctgaggcctttaagagactgggcaaggaggtcatcctcatcgatgtcgtggacacatgcctggccggctactacgatcaggacctctccgagatgatgagacagaacctggaggaccacggcatcgagctcgccttcggcgaaaccgtgaaagccattgagggcgacggaaaggtcgagaggatcgtcaccgataaagctagccacgacgtggacatggtcatcctggctgtgggctttaggcccaacacagctctgggcaatgccaagctgaagacctttaggaacggcgccttcctcgtcgacaagaagcaggagacatccattcctgacgtgtacgccatcggcgactgcgccaccgtgtatgacaacgccatcaacgacaccaactatatcgccctggcttccaacgccctcagaagcggaattgtggccggccataatgccgctggccacaagctcgagtccctgggagtgcagggctccaacggaattagcatcttcggcctcaacatggtgtccacaggcctgacccaagagaaggccaaaagattcggctacaatcccgaggtgaccgcttttaccgactttcagaaggcctccttcatcgagcacgacaactatcctgtgaccctgaagatcgtctacgacaaggactccagactggtcctgggagctcagatggcctccaaggaggacatgtccatgggaatccacatgttttccctggccatccaggaaaaggtgaccatcgagagactcgccctcctcgactatttcttcctcccccatttcaaccaaccttataactacatgattaaggccgccctcaaggccaaaggtggatctggtggatctggtggatctatggattacaaggatgacgatgacaagtaaacgcgt

SEQ ID NO: 320 - DNA, 1496 bp, Artificial Sequence
  Synthetic Construct
gcggccgcatgctggccacaagagtgttctccctcgtcggcaaaagagccatcagcacaagcgtctgcgtgagggcccacaaagtgatcgtgatcggctgcaaccacgctggaacatgggccgctaaaaccctgaaggccacagaccccaactgtcaggtggtgacctacgacaggaacgacaacatctccttcctcgcctgtggaatcgctctgtgggtcggcggcgtggtgaaggaccctaaaggcctcttttatgccagccctgagtccctgaggggagagggaattgacgtctatatgggccacgacgtgaccaagatcgactgggccaacaagaagctctgcgtgaaggagctcaagaccggcaaggagttcgaggacacctatgacaagctgatcctggctacaggatcctggcccgtgacccctcccatcgaaggactgaagcaggagggcaccacctacggactgaagaagggaatcttctttagcaagctgtaccaacagggccaggagattatcgacgagatcgccaagcctgacgtgaagaaggtgatggtggtgggagccggatatatcggagtcgagctcatcgaggccttcaagaaccatggcaaggaggtgattctgatggaggccatgcctagggtgatggccaattacttcgacaaggagatcaccgacgaggccgaaaaaaggatcaaggaggccggcatcgagatgcatctgggcgagacagtgaagaagttcgaaggcgacgacagagtgaagaaggtcgtcaccgacaagggctcctatgacgtggacatggtcgtcatgagcgtcggcttcaggcctaacaacgagctgtataaagactatctggagaccctgcccaatggcgccatcgtcgtcgataccaccatgaagaccaccaaggatcccgacgtgttcgccattggagattgcgccaccgtgtatagcagggcctccgagaagcaagaatacatcgccctgagcaccaacgctgtgaggatgggcattgtggctgctaacaacgccctgggaaagcacgtcgagtactgtggcacccaaggctccaacgctatctgcgtcttcggctacaacatggcctccacaggctggagcgaagagacagccaagaagaagggactcaaggtgaagtccaacttcttcaaggacagcgagaggcctgagttcatgcccacaaatgaggacgtcctcgtcaagatcatctacgaagagggctccaggaggctgctgggagctcagattgccagcaagcacaaccacgccgaagctattcacgccttcagcctcgccatccagaacggaatgaccgtggatcagttcgccctgtccgacttcttcttcctgccccactacaataagcccctgtcctggatgacaatggtggcctacacagctaaaggtggatctggtggatctggtggatctatggattacaaggatgacgatgacaagtaaacgcgt

SEQ ID NO: 321 - DNA, 33 bp, Artificial Sequence
  Synthetic Construct
ttaattgcggccgcatgaaggtcaccgtggtcg

SEQ ID NO: 322 - DNA, 33 bp, Artificial Sequence
  Synthetic Construct
ttaattgcggccgcatgaagattgtcgtcatcg

SEQ ID NO: 323 - DNA, 33 bp, Artificial Sequence
  Synthetic Construct
ttaattgcggccgcatgagcaagatcgtggtgg

SEQ ID NO: 324 - DNA, 35 bp, Artificial Sequence
  Synthetic Construct
ttaattgcggccgcatgagcaagatcgtgatcgtc

SEQ ID NO: 325 - DNA, 33 bp, Artificial Sequence
  Synthetic Construct
ttaattgcggccgcatgaaagtgatcgtgatcg

SEQ ID NO: 326 - DNA, 35 bp, Artificial Sequence
  Synthetic Construct
ttaattacgcgtttacttgtcatcgtcatccttgt

SEQ ID NO: 327 - DNA, 32 bp, Artificial Sequence
  Synthetic Construct
ttaattggatccatgaaggtcaccgtggtcgg

SEQ ID NO: 328 - DNA, 31 bp, Artificial Sequence
  Synthetic Construct
ttaattctcgagtcacttgtcatcgtcatcc

SEQ ID NO: 329 - protein, 449 aa, Artificial Sequence
  Synthetic Construct
KVTVVGCTHAGTFAIKQILAEHPDAEVTVYERNDVISFLSCGIALYLGGKVADPQGLFYSSPEELQKLGANVQMNHNVLAIDPDQKTVTVEDLTNHAQTTESYDKLVMTSGSWPIVPKIPGIDSDRVKLCKNWAHAQALIEDAKEAKRITVIGAGYIAAELAEAYSTTGHDVTLIARSARVMRKYFDADFTDVIEQDYRDHGVQLALGETVESFTDSATGLTIKTDKNSYETDLAILCIGFRPNTDLLKGKVDMAPNGAIITDDYMRSSNPDIFAAGDSAAVHYNPTHQNAYIPLATNAVRQGILVGKNLVKPTVKYMGTQSSSGLALYDRTIVSTGLTLAAAKQQGLNAEQVIVEDNYRPEFMPSTEPVLMSLVFDPDTHRILGGALMSKYDVSQSANTLSVCIQNENTIDDLAMVDMLFQPNFDRPFNYLNILAQAAQAKVAQSVNA

SEQ ID NO: 330 - protein, 456 aa, Streptococcus mutans
SKIVIVGANHAGTAAINTVLDNYGSENEVVVFDQNSNISFLGCGMALWIGKQISGPQGLFYADKESLEAKGAKIYMESPVTAIDYDAKRVTALVNGQEHVESYEKLILATGSTPILPPIKGAAIKEGSRDFEATLKNLQFVKLYQNAEDVINKLQDKTQNLNRIAVVGAGYIGVELAEAFKRLGKEVILIARHDTCLRGYYDQDLSEMMRQNLEDHGIELAFGETVKAIEGDGKVERIVTDKASHDVDMVILAVGFRPNTALGNAKLKTFRNGAFLVDKKQETSIPDVYAIGDCATVYDNAINDTNYIALASNALRSGIVAGHNAAGHKLESLGVQGSNGISIFGLNMVSTGLTQEKAKRFGYNPEVTAFTDFQKASFIEHDNYPVTLKIVYDKDSRLVLGAQMASKEDMSMGIHMFSLAIQEKVTIERLALLDYFFLPHFNQPYNYMIKAALKAK
